(19) United States
(12) Patent Application Publication
(10) Pub. No.: US 2008/0113874 A1
(43) Pub. Date: May 15, 2008

(54) GEFITINIB SENSITIVITY-RELATED GENE EXPRESSION AND PRODUCTS AND METHODS RELATED THERETO

(75) Inventors: Paul A. BUNN, Steamboat Springs, CO (US); Christopher D. COLDREN, Denver, CO (US); Wilbur A. FRANKLIN, Denver, CO (US); Mark W. GERACI, Aurora, CO (US); Barbara A. HELFRICH, Lakewood, CO (US); Fred R. HIRSCH, Denver, CO (US); Razvan LAPADAT, Indianapolis, IN (US); Michio SUGITA, Centennial, CO (US); Samir E. WITTA, Greenwood Village, CO (US)

Correspondence Address: Sheridan Ross P.C.;Angela Dallas Sebor, Ph.D., 1560 Broadway, Denver, CO, 80202, US

(73) Assignee: THE REGENTS OF THE UNIVERSITY OF COLORADO, Boulder, CO (US)

(21) Appl. No.: 11/781,946

(22) Filed: Jul. 23, 2007

Related U.S. Application Data
(63) Continuation-in-part of application No. 10/587,052, filed on Apr. 9, 2007.
(60) Provisional application No. 60/538,682, filed on Jan. 23, 2004.

(51) Int. Cl. C40B 30/04; G01N 33/574; C12Q 1/68

(52) U.S. Cl. 506/9; 435/7.23; 435/6

(57) ABSTRACT

Disclosed is the identification, provision and use of a panel of biomarkers that predict sensitivity or resistance to EGFR inhibitors, and products and processes related thereto. In one embodiment, a method is described for selecting a cancer patient who is predicted to benefit from therapeutic administration of an EGFR inhibitor, an agonist thereof, or a drug having substantially similar biological activity as EGFR inhibitor. Also described is a method to identify molecules that interact with the EGFR pathway to allow or enhance responsiveness to EGFR inhibitors, as well as a plurality of polynucleotides or antibodies for detection of the expression of genes that are indicative of sensitivity or resistance to EGFR inhibitors, an agonist thereof, or a drug having substantially similar biological activity as EGFR inhibitors. A method to identify a compound with the potential to enhance the efficacy of EGFR inhibitors is also described.

### CROSS-REFERENCE

[0001] This application is a continuation-in-part application of U.S. application Ser. No. 10/587,052, filed Jul. 24, 2006, to which application we claim priority under 35 USC § 120, which claimed priority to PCT/US2005/002325, filed Jan. 24, 2005, which claimed priority to U.S. Provisional Application No. 60/538,682, filed Jan. 23, 2004. Each of these applications are incorporated herein by reference in their entirety.

### FIELD OF THE INVENTION

[0002] This invention generally relates to methods to screen for patients that are predicted to benefit from therapeutic administration of gefitinib, as well as methods to identify compounds that interact with the epidermal growth factor receptor (EGFR) pathway to allow or enhance responsiveness to EGFR inhibitors, and products and methods related thereto.

### INCORPORATION BY REFERENCE

[0003] This application contains references to nucleotide sequences which have been submitted concurrently herewith as the sequence listing text file “Converted 35611-719.501 Sequence_Listing.txt”, file size 732 KiloBytes (KB), created on Jul. 23, 2007. The aforementioned sequence listing is hereby incorporated by reference in its entirety pursuant to 37 CFR § 1.52(e)(5).

### BACKGROUND OF THE INVENTION

[0004] Lung Cancer is the leading cause of death from cancer worldwide. Chemotherapy is the mainstay of treatment for lung cancer. However, less than a third of patients with advanced stages of non-small cell lung cancer (NSCLC) respond to the best two chemotherapy drug combinations. Therefore, novel agents that target cancer specific biological pathways are needed.

[0005] The epidermal growth factor receptor (EGFR) is one of the most appealing targets for novel therapies for cancer. EGFR plays a major role in transmitting stimuli that lead to proliferation, growth and survival of various cancer types, including, but not limited to, NSCLC. Ligand binding to the EGFR receptor leads to homo- or heterodimerization of EGFR with other ErbB receptors. EGFR is overexpressed in a large proportion of invasive NSCLC and in premalignant bronchial lesions/Bronchioloalveolar carcinoma/(BAC), a subtype of non-small cell lung cancer, represents the major form of lung cancer in non-smoking females and is rising in frequency, and epidermal growth factor receptor (EGFR) is expressed with high frequency in BAC. Unfortunately, the response of BACs to conventional chemotherapy is poor. Activation of EGFR leads to simultaneous activation of several signaling cascades including the MAPK pathway, the protein kinase C (PKC) pathway and the PI(3)K-activated AKT pathway (FIG. 1). EGFR signaling translated in the nucleus leads to cancer cell proliferation and survival.

[0006] Targeted therapy against the EGFR receptor has produced response rates of 25-30% as first line treatment and 11-20% in 2nd and 3rd line settings (e.g., chemo-refractory advanced stage NSCLC). For example, in phase II clinical trials, 11-20% of patients with chemo-refractory advanced stage NSCLC responded to treatment with the EGFR tyrosine kinase inhibitor gefitinib (commercially available as Iressa®, ZD1839). A trial evaluating the activity of the EGFR inhibitor, erlotinib (Tarceva®, OSI-774) has been completed and the results will be reported in the near future. A retrospective analysis of 140 patients responding to treatment with gefitinib revealed that the presence of BAC features (p=0.005) and being a never smoker (p=0.007) were the only independent 5 predictors of response to gefitinib. These data suggest that EGFR inhibitor therapy is more active in BAC and in non-smokers.

[0007] However, currently, there are no selection criteria for determining which NSCLC patients will benefit from treatment with EGFR inhibitors such as gefitinib. Moreover, EGFR expression does not predict gefitinib sensitivity. Therefore, despite the correlation of tumor histology and smoking history with gefitinib response, it is of great importance to identify molecular molecules that influence gefitinib responsiveness, and to develop adjuvant treatments that enhance the response. To accomplish this goal, there is a need in the art to define critical aspects of EGFR signaling and to identify which molecules interact with the EGFR pathway to dictate responsiveness to EGFR inhibitors.

### SUMMARY OF THE INVENTION

[0008] One embodiment of the present invention relates to a method to select a cancer patient who is predicted to benefit from therapeutic administration of an EGFR inhibitor, an agonist thereof, or a drug having substantially similar biological activity as EGFR inhibitor. The method includes the steps of: (a) providing a sample of tumor cells from a patient to be tested; (b) detecting in the sample the expression of one or more genes chosen from a panel of genes whose expression has been correlated with sensitivity or resistance to an EGFR inhibitor; (c) comparing the level of expression of the gene or genes detected in the patient sample to a level of expression of the gene or genes that has been correlated with sensitivity or resistance to the EGFR inhibitor; and (d) selecting the patient as being predicted to benefit from therapeutic administration of the EGFR inhibitor, if the expression of the gene or genes in the patient's tumor cells is statistically more similar to the expression levels of the gene or genes that has been correlated with sensitivity to the EGFR inhibitor than to resistance to the EGFR inhibitor.

[0009] In one aspect, the panel of genes in (b) is identified by a method comprising: (a) providing a sample of cells that are sensitive or resistant to treatment with the EGFR inhibitor; (b) detecting the expression of at least one gene in the EGFR inhibitor-sensitive cells as compared to the level of expression of the gene or genes in the EGFR inhibitor-resistant cells; and (c) identifying a gene or genes having a level of expression in EGFR inhibitor-sensitive cells that is statistically significantly different than the level of expression of the gene or genes in EGFR inhibitor-resistant cells, as potentially being a molecule that interacts with the EGFR pathway to allow or enhance responsiveness to EGFR inhibitors.

[0010] In another aspect, the EGFR inhibitor is gefitinib. In this aspect, step (b) can include, in one embodiment, detecting in the sample the expression of one or more genes chosen from a gene comprising, or expressing a transcript comprising, a nucleic acid sequence selected from the group consisting of SEQ ID NOs: 1-194. Step (c) comprises comparing the level of expression of the gene or genes detected in the patient sample to a level of expression of the gene or genes that has been correlated with sensitivity or resistance to gefitinib. Step (d) comprises selecting the patient as being predicted to benefit from therapeutic administration of gefitinib, an agonist thereof, or a drug having substantially similar biological activity as gefitinib, if the expression of the gene or genes in the patient's tumor cells is statistically more similar to the expression levels of the gene or genes that has been correlated with sensitivity to gefitinib than to resistance to gefitinib.

[0011] In any of the embodiments above, the method can include detecting expression of at least two genes in (b), at least three genes in (b), at least four genes in (b), at least five genes in (b), at least 10 genes in (b), at least 25 genes in (b), at least 50 genes from in (b), at least 100 genes in (b), at least 150 genes in (b), or up to all of the genes in the panel of genes.

[0012] In one aspect of this method, expression of the gene or genes is detected by measuring amounts of transcripts of the gene in the tumor cells. In another aspect, expression of the gene or genes is detected by detecting hybridization of at least a portion of the gene or a transcript thereof to a nucleic acid molecule comprising a portion of the gene or a transcript thereof in a nucleic acid array. In another aspect, expression of the gene is detected by detecting the production of a protein encoded by the gene. In yet another aspect, the method includes detecting expression of at least one gene selected from the group consisting of: E-cadherin (represented by SEQ ID NO:3) and ErbB3 (represented by SEQ ID NO:15 or SEQ ID NO:133). For example, the method can include detecting expression of at least one gene selected from the group consisting of ZEB1 and SIP1.

[0013] In one aspect of this method, the method includes comparing the expression of the gene or genes to expression of the gene or genes in a cell from a non-cancerous cell of the same type. In another aspect, the method includes comparing the expression of the gene or genes to expression of the gene or genes in an autologous, non-cancerous cell from the 5 patient. In another aspect, the method includes comparing the expression of the gene or genes to expression of the gene or genes in a control cell that is resistant to the EGFR inhibitor. In yet another aspect, the method includes comparing the expression of the gene or genes to expression of the gene or genes in a control cell that is sensitive to the EGFR inhibitor. In another aspect, control expression levels of the gene or genes that has been correlated with sensitivity and/or resistance to the EGFR inhibitor has been predetermined.

[0014] Yet another embodiment of the present invention relates to a method to identify molecules that interact with the EGFR pathway to allow or enhance responsiveness to EGFR inhibitors. The method includes the steps of: (a) providing a sample of cells that are sensitive or resistant to treatment with gefitinib; (b) detecting the expression of at least one gene in the gefitinib-sensitive cells as compared to the level of expression of the gene or genes in the gefitinib-resistant cells; and (c) identifying a gene or genes having a level of expression in gefitinib-sensitive cells that is statistically significantly different than the level of expression of the gene or genes in gefitinib-resistant cells, as potentially being a molecule that interacts with the EGFR pathway to allow or enhance responsiveness to EGFR inhibitors.

[0015] Another embodiment of the present invention relates to a plurality of polynucleotides for the detection of the expression of genes that are indicative of sensitivity or resistance to gefitinib, an agonist thereof, or a drug having substantially similar biological activity as gefitinib. The plurality of polynucleotides consists of at least two polynucleotides, wherein each polynucleotide is at least 5 nucleotides in length, and wherein each polynucleotide is complementary to an RNA transcript, or nucleotide derived therefrom, of a gene that is regulated differently in gefitinib-sensitive tumor cells as compared to gefitinib-resistant cells. In one aspect, each polynucleotide is complementary to an RNA transcript, or a polynucleotide derived therefrom, of a gene comprising, or expressing a transcript comprising, a nucleic acid sequence selected from the group consisting of SEQ ID NOs: 1-194. In another aspect, the plurality of polynucleotides comprises polynucleotides that are complementary to an RNA transcript, or a nucleotide derived therefrom, of at least two genes comprising, or expressing a transcript comprising, a nucleic acid sequence selected from the group consisting of SEQ ID NOs: 1-194. In another aspect, the plurality of polynucleotides comprises polynucleotides that are complementary to an RNA transcript, or a nucleotide derived 5 therefrom, of at least five genes, at least 10 genes, at least 25 genes, at least 50 genes, at least 100 genes, at least 150 genes, or up to all of the genes, comprising, or expressing a transcript comprising, a nucleic acid sequence selected from the group consisting of SEQ ID NOs: 1-194. In one aspect, the polynucleotide probes are immobilized on a substrate. In another aspect, the polynucleotide probes are hybridizable array elements in a microarray. In yet another aspect, the polynucleotide probes are conjugated to detectable markers.

[0016] Yet another embodiment of the present invention relates to a plurality of antibodies, antigen binding fragments thereof, or antigen binding peptides, for the detection of the expression of genes that are indicative of sensitivity or resistance to gefitinib, an agonist thereof, or a drug having substantially similar biological activity as gefitinib. The plurality of antibodies, antigen binding fragments thereof, or antigen binding peptides consists of at least two antibodies, antigen binding fragments thereof, or antigen binding peptides, each of which selectively binds to a protein encoded by a gene comprising, or expressing a transcript comprising, a nucleic acid sequence selected from the group consisting of SEQ ID NOs: 1-194.

[0017] Another embodiment of the present invention relates to a method to identify a compound with the potential to enhance the efficacy of EGFR inhibitors. The method includes the steps of: (a) contacting a test compound with a cell that expresses at least one gene, wherein said gene is selected from any one of the genes comprising, or expressing a transcript comprising, a nucleic acid sequence selected from the group consisting of SEQ ID NOs: 1-194; (b) identifying compounds selected from the group consisting of: (i) compounds that increase the expression or activity of the gene or genes in (a), or the proteins encoded thereby, that are correlated with sensitivity to gefitinib; and (ii) compounds that decrease the expression or activity of genes in (a), or the proteins encoded thereby, that are correlated with resistance to gefitinib. The compounds are identified as having the potential to enhance the efficacy of EGFR inhibitors. In one aspect of this embodiment, the cell expresses a gene encoding E-cadherin or ErbB3, and wherein step (b) comprises identifying compounds that increase the expression or activity of E-cadherin or ErbB3 or the gene encoding E-cadherin or ErbB3. In another aspect of this embodiment, the cell expresses a gene encoding ZEB1 and SIP1, wherein step (b) comprises identifying compounds that decrease the expression or activity ZEB1 or SIP1 or the gene encoding ZEB1 or SIP1.

[0018] Another embodiment of the present invention relates to a method to treat a patient with a cancer, comprising administering to the patient a therapeutic composition comprising a compound identified by the method described above.

[0019] Yet another embodiment of the present invention relates to a method to treat a patient with a cancer, comprising administering to the patient a therapeutic composition comprising a compound that upregulates the expression or activity of E-cadherin or ErbB3 or the gene encoding E-cadherin or ErbB3 in the tumor cells of the patient. Another embodiment of the present invention relates to a method to treat a patient with a cancer, comprising administering to the patient a therapeutic composition comprising a compound that downregulates the expression of ZEB1 or SIP1 or the gene encoding ZEB1 or SIP1 in the tumor cells of the patient.

### INCORPORATION BY REFERENCE

[0020] All publications and patent applications mentioned in this specification are herein incorporated by reference to the same extent as if each individual publication or patent application was specifically and individually indicated to be incorporated by reference.

### BRIEF DESCRIPTION OF THE FIGURES OF THE INVENTION

[0021] The novel features of the invention are set forth with particularity in the appended claims. A better understanding of the features and advantages of the present invention will be obtained by reference to the following detailed description that sets forth illustrative embodiments, in which the principles of the invention are utilized, and the accompanying drawings of which:

[0022] FIG. 1 is a schematic diagram showing the activation of signaling cascades from EGFR.

[0023] FIG. 2 is a schematic diagram showing E-cadherin regulation.

[0024] FIG. 3 is a digital image showing the expression of EGFR and phosphorylated EGFR in NSCLC cell lines.

[0025] FIG. 4 is a digital image showing that ZD1839 downregulates pEGFR in sensitive NSCLC cell lines.

[0026] FIG. 5 is a line graph showing the effects of gefitinib on A549 NSCLC xenografts.

[0027] FIG. 6 is a bar graph showing the expression of E-cadherin in NSCLC cell lines using GeneSpring analysis of microarrays.

[0028] FIG. 7 is a digital image showing Western blot analysis of E-cadherin expression in NSCLC cell lines.

[0029] FIG. 8 is a bar graph showing real time RT-PCR analysis of ZEB1 and SIP1 expression in NSCLC cell lines.

[0030] FIG. 9 is a schematic drawing showing the use of siRNA to silence the E-cadherin transcriptional repressors, SIP1 and ZEB1 to determine the effect on NSCLC cell line responses to ZD1839.

### DETAILED DESCRIPTION OF THE INVENTION

[0031] While preferred embodiments of the present invention have been shown and described herein, it will be obvious to those skilled in the art that such embodiments are provided by way of example only. Numerous variations, changes, and substitutions will now occur to those skilled in the art without departing from the invention. It should be understood that various alternatives to the embodiments of the invention described herein may be employed in practicing the invention. It is intended that the following claims define the scope of the invention and that methods and structures within the scope of these claims and their equivalents be covered thereby.

[0032] The present invention generally relates to the identification, provision and use of a panel of biomarkers that predict sensitivity or resistance to gefitinib and other EGFR inhibitors, and products and processes related thereto. Specifically, the present inventors have used NSCLC cell lines with varying sensitivity to the EGFR inhibitor, gefitinib, to define the novel panel of biomarkers as described herein. In order to identify a marker panel that could be used for selection of NSCLC patients who will respond to gefitinib treatment, the inventors undertook preclinical in vitro studies using NSCLC cell lines. Based on the therapeutic response to gefitinib by using the IC₅₀ definition (i.e., the concentration of agent needed to kill 50% of the tumor cells in a cell culture), the present inventors have classified the cell lines as sensitive (IC₅₀<1 μM), resistant (IC₅₀>10 μM), or having intermediate sensitivity (1 μM<IC₅₀<10 μM) to gefitinib. The cell lines were characterized by gene microarray analysis (Affymetrix™ microarray Human Genome U133 set, 39,000 genes). By comparing the gene microarray results from sensitive and resistant cell lines, the inventors have identified a panel of genes that can discriminate between sensitive and resistant cell lines. These biomarkers (i.e., the genes identified) will be of great clinical significance in selecting NSCLC patients/human tumors which will respond to this agent. The biomarkers identified by the present invention, and their expression levels in gefitinib sensitive and resistant cells, are listed in Table 1, and the nucleotide sequences representing such biomarkers are represented herein by SEQ ID NOs: 1-194. The nucleic acid sequences represented by SEQ ID NOs: 1-194 include transcripts or nucleotides derived therefrom (e.g., cDNA) expressed by the gene biomarkers in Table 1. It is to be understood that the present invention expressly covers additional genes that can be elucidated using substantially the same techniques used to identify the genes in Table 1 and that any of such additional genes can be used in the methods and products described herein for the genes and probe sets in Table 1. Any reference to database Accession numbers or other information regarding the genes and probe sets in Table 1 is hereby incorporated by reference in its entirety. For each biomarker listed in Table 1, the following information is provided: (1) the probe set ID number given by Affymetrix™ for the set of features on the array representing the indicated gene; (2) the parametric p-value, indicating the statistical significance of that individual gene expression difference; (3) the mean intensity of expression of each gene in a gefitinib-sensitive and a gefitinib-resistant cell line; (4) the HUGO-approved symbol for the gene, where one exists; (5) the sequence identifier representing a nucleotide sequence found in or transcribed by the gene; and (6) the name or title of the gene, where one is given. It is noted that sometimes two probe sets in Table 1 will refer to a single gene, and these duplications have been maintained because they are believed to reflect 5 different splice variants of that gene. In such a case, the associated sequence files will reflect the different splicotypes for that gene. The genes in Table 1 have been sorted by their parametric p-value to indicate the genes that are most highly regulated by gefitinib first.

[0033] In addition, the present invention will also be useful for the validation in other studies of the clinical significance of many of the specific biomarkers described herein, as well as the identification of preferred biomarker profiles, highly sensitive biomarkers, and targets for the design of novel therapeutic products and strategies. The biomarkers described herein are particularly useful in clinical practice to select the patients who will benefit most from EGFR inhibitor treatment, and in specific embodiments, from gefitinib treatment, erlotinib treatment, and lapatinib treatment.

[0034] The present inventors have already used the biomarkers described herein to identify specific targets for the further development of diagnostic and therapeutic approaches used in cancer, and these studies are described in detail in the Examples. For example, E-cadherin is a calcium-dependent epithelial cell adhesion molecule that plays an important role in tumor invasiveness and metastatic potential. Reduced E-cadherin expression is associated with tumor cell dedifferentiation, advanced stage and reduced survival in patients with NSCLC. Using Western blot analysis, E-cadherin was expressed in three cell lines highly sensitive to gefitinib and its expression was lacking in six gefitinib resistant cell lines tested. Real-time RT-PCR was used to evaluate the gene expression pattern in 11 NSCLC cell lines and compared to gene expression in normal bronchial epithelium. E-cadherin expression was elevated in cell lines sensitive to gefitinib and downregulated in the resistant cell lines as compared to the normal bronchial epithelium. The expression of E-cadherin is regulated by zinc finger inhibitory proteins by the recruitment of histone deacetylases (HDAC). Using real-time RT-PCR, the expression of the two zinc-finger transcription factors, δEF1/ZEB1 and SIP1/ZEB2, involved in E-cadherin repression was evaluated. Results showed that ZEB1 was expressed in gefitinib resistant cell lines and its expression was lacking in gefitinib sensitive cell lines. The present inventors have also found that δEF1/ZEB1 and SIP1/ZEB2 may regulate Her3, which is an EGFR heterodimer. These data indicate that the expression of ZEB1 may predict resistance to EGFR tyrosine kinase inhibitors and future studies directed at modulating the regulation of E-cadherin expression are expected to enhance the activity of EGFR inhibitors in NSCLC.

[0035] Finally, in one non-limiting example, the present invention also relates to protein profiles which can discriminate between sensitive and resistant NSCLC tumors. Additional compounds may be screened for activity and/or efficacy in treating various cancers. Similarly, biomarkers related to the sensitivity or resistance of a cancer to a given compound of can be screened. Furthermore, additional cancer types can be screened with the methods described herein.

[0036] Prior to the present invention, to the best of the present inventors' knowledge, no single marker, or marker panel, has been demonstrated to be useful for selection of lung cancer patients who will benefit from EGFR inhibitors, and particularly, gefitinib, treatment. Nor are there any such markers (related to EGFR inhibitors) identified for other types of cancer.

[0037] Accordingly, in one example using the gene expression profiles disclosed in Table 1 for gefitinib-sensitive and resistant cells, one can rapidly, effectively and efficiently screen patients/human tumors for a level of sensitivity or resistance to gefitinib and also to other EGFR inhibitors having biological activity substantially similar to gefitinib (i.e., drugs having similar activities, gefitinib agonists and other derivatives). The results will allow for the identification of tumors/patients that are likely to benefit from administration of the drug and therefore, the genes are used to enhance the ability of the clinician to develop prognosis and treatment protocols for the individual patient. In addition, genes identified in Table 1 can be further validated as targets and then used in assays to identify therapeutic reagents useful for regulating the expression or activity of the target in a manner that improves sensitivity of a cell to gefitinib or analogs thereof. The knowledge provided from the expression profile of genes described herein and the identification additional genes using similar methods can also be used to identify the molecular mechanisms of EGFR inhibition, such knowledge being useful for the further development of new therapies and even analogs of gefitinib or other EGFR inhibitors with improved efficacies in cancer treatment. Moreover, given the knowledge of these genes, one can produce novel combinations of polynucleotides and/or antibodies and/or peptides for use in the various assays, diagnostic and/or therapeutic approaches described herein.

[0038] Finally, the present invention is also illustrative of methods by which patients can be evaluated for predicted sensitivity or resistance to EGFR inhibitors other than gefitinib, and of methods of identifying additional genes and gene panels that are regulated differentially by cells that are sensitive to or resistant to gefitinib or other EGFR inhibitors. Such genes and panels of genes can then be used in the assays and methods described herein and as targets useful for the development of novel EGFR inhibitors and therapeutic formulations. In one embodiment, the gene or genes whose expression is detected is selected from among E-cadherin, Erb3, Her3, vimentin, cyclin D3, cyclin D1, EGFR, and any combination thereof.

[0039] In addition to gefitinib, various tyrosine-kinase inhibitors, including but not limited to EGFR inhibitors, are contemplated herein. Currently there are two main classes of EGFR inhibitors: anti-EGFR family tyrosine kinase inhibitors (small molecules) and anti-EGFR monoclonal antibodies. Both categories are contemplated within the meaning of EGFR inhibitor used herein. Examples of small molecules include EGFR-specific and reversible inhibitors such as, for example, gefitinib (IRESSA®, ZD1839), erlotinib (TARCEVA®, OSI-774, CP-358), or PKI-166; EGFR-specific and irreversible inhibitors, such as EKI-569; a PAN-HER (human EGF receptor family) reversible inhibitor, such as GW2016 (targets both EGFR and Her2/neu); and a PAN-HER irreversible inhibitor, such as CI-1033 (4-anilinoquinazoline).

[0040] Further examples of tyrosine kinase inhibitors and EGFR antagonists include, but are not limited to, small molecules such as compounds described in U.S. Pat. Nos. 5,616,582, 5,457,105, 5,475,001, 5,654,307, 5,679,683, 6,084,095, 6,265,410, 6,455,534, 6,521,620, 6,596,726, 6,713,484, 5,770,599, 6,140,332, 5,866,572, 6,399,602, 6,344,459, 6,602,863, 6,391,874, 6,344,455, 5,760,041, 6,002,008, and 5,747,498, as well as the following PCT publications: WO98/14451, WO98/50038, WO99/09016, and WO99/24037. Additional small molecule EGFR antagonists include, but are not limited to, PD 183805 (CI 1033, 2-propenamide, N-[4-[(3-chloro-4-fluorophenyl)amino]-7-[3-(4-morpholinyl)propoxy]-6-quin-azolinyl]-, dihydrochloride, Pfizer Inc.); ZM 105180 ((6-amino-4-(3-methylphenyl-amino)-quinazoline, Zeneca); BIBX-1382 (N-8-(3-chloro-4-fluoro-phenyl)-N-2-(1-methyl-piperidin-4-yl)-pyrimido[5,-4-d]pyrimidine-2,8-diamine, Boehringer Ingelheim); PKI-166 ((R)-4-[4-[(1-phenylethyl)amino]-1H-pyrrolo[2,3-d]pyrimidin-6-yl]-phenol)-; (R)-6-(4-hydroxyphenyl)-4-[(1-phenylethyl)amino]-7H-pyrrolo[2,3-d]pyrimi-dine); CL-387785 (N-[4-[(3-bromophenyl)amino]-6-quinazolinyl]-2-butynamide); EKB-569 (N-[4-[(3-chloro-4-fluorophenyl)amino]-3-cyano-7-ethoxy-6-quinolinyl]-4-(-dimethylamino)-2-butenamide) (Wyeth); Imatinib; STI-571; LFM-A13; PD153035; Piceatannol; PP1, Lapatinib (Tykerb®, GW572016, GlaxoSmithKline); AEE788; SU4132; SU6656; Semazanib; SU6668, ZD6126 AG1478 (Sugen); and AG1571 (SU 5271; Sugen). Further examples of EGFR and HER family antagonists or inhibitors will be known in the art and are also contemplated herein.

[0041] Examples of monoclonal antibodies and antibody variants, fusions, derivatives, and fragements thereof include C225 (CETUXIMAB; ERBITUX.RTM.), ABX-EGF (human) (Abgenics, San Francisco, Calif.), EMD-72000 (humanized), h-R3 (humanized), and MDX-447 (bi-specific, EGFR-CK64); MAb 579 (ATCC CRL HB 8506), MAb 455 (ATCC CRL HB8507), MAb 225 (ATCC CRL 8508), MAb 528 (ATCC CRL 8509) (see, U.S. Pat. No. 4,943,533, Mendelsohn et al.) and variants thereof, and reshaped human 225 (H225) (see, WO 96/40210, Imclone Systems Inc.); IMC-11F8, a fully human, EGFR-targeted antibody (Imclone); antibodies that bind type II mutant EGFR (U.S. Pat. No. 5,212,290); humanized and chimeric antibodies that bind EGFR as described in U.S. Pat. No. 5,891,996; and human antibodies that bind EGFR, such as ABX-EGF or Panitumumab (see WO98/50433, Abgenix/Amgen); EMD 55900 (Stragliotto et al. Eur. J. Cancer 32A:636-640 (1996); human EGFR antibody, HuMax-EGFR(GenMab); fully human antibodies known as E1.1, E2.4, E2.5, E6.2, E6.4, E2.11, E6.3 and E7.6.3 and described in U.S. Pat. No. 6,235,883; and mAb 806 or humanized mAb 806 (Johns et al., J. Biol. Chem. 279(29):30375-30384 (2004)).

[0042] The anti-EGFR antibody may be conjugated with a cytotoxic agent, thus generating an immunoconjugate (see, e.g., EP659,439A2, Merck Patent GmbH). Additionally, fusion proteins, single chain antibodies, and fragments or variants thereof based upon the antibodies and epitope binding regions of the antibodies described above are also contemplated herein. The construction of such polypeptides, fusion proteins, and single chain antibodies is known in the art and can include, but is not limited to, conventional recombinant techniques

[0043] In addition to the NSCLC described in several examples, the methods described herein can be used to identify biomarkers in numerous cancer types. While NSCLC is used as an exemplary cancer, it will be understood in the art that other cancers are useful, and thus within the scope of the methods described herein. Such additional cancers include, but are not limited to, cancers that are epithelial malignancies (having epithelial origin), and particularly any cancers (tumors) that express EGFR. In one non-limiting example, provided herein is a method to identify a cancer that is resistant to EGFR inhibitors and in one aspect, the cancer is an epithelial malignancy that is resistant to EGFR inhibitors. In an EGFR inhibitor-resistant cancer, the cancer can include tumors (cancerous cells) with little or no gain in copy number (low/no gene amplification or polysomy), tumors that are low expressors of EGFR protein (in the lower 50% of an appropriate scoring protocol, as in PCT Publication No. WO 2005/117553), or especially a combination of low/no gain of EGFR gene and low/no expression of EGFR protein. EGFR-resistant cancers can also include tumors that have low/no gain in EGFR and are P-Akt positive, or tumors with EGFR gene amplification and/or polysomy, but that are P-Akt negative. EGFR-resistant cancers can also include tumors without mutations in EGFR that meet one or more of the other criteria for poor or non-responders as discussed above. Non-limiting examples of premalignant or precancerous cancers/tumors having epithelial origin include actinic keratoses, arsenic keratoses, xeroderma pigmentosum, Bowen's disease, leukoplakias, metaplasias, dysplasias and papillomas of mucous membranes, e.g. of the mouth, tongue, pharynx and larynx, precancerous changes of the bronchial mucous membrane such as metaplasias and dysplasias (especially frequent in heavy smokers and people who work with asbestos and/or uranium), dysplasias and leukoplakias of the cervix uteri, vulval dystrophy, precancerous changes of the bladder, e.g. metaplasias and dysplasias, papillomas of the bladder as well as polyps of the intestinal tract. Non-limiting examples of semi-malignant or malignant cancers/tumors of the epithelial origin are breast cancer, skin cancer (e.g., basal cell carcinomas), bladder cancer (e.g., superficial bladder carcinomas), colon cancer, gastrointestinal (GI) cancer, prostate cancer, uterine cancer, cervical cancer, ovarian cancer, esophageal cancer, stomach cancer, laryngeal cancer and lung cancer.

[0044] Provided herein is a method of selecting a cancer patient having a cancer of epithelial origin comprising providing a sample of the cancer from the patient, detecting the expression of one or more genes whose expression has been correlated with sensitivity or resistance to an EGFR inhibitor, comparing the level of expression of the gene or genes detected in the patient sample to a level of expression of the gene or genes that has been correlated with sensitivity or resistance to the EGFR inhibitor. In a further embodiment, a patient is selected as being predicted to benefit from administration of the EGFR inhibitor if the expression of the gene or genes is similar to the expression of the gene or genes that have been correlated with sensitivity to the EGFR inhibitor. Non-limiting examples of cancers having epithelial origin include breast cancer, skin cancer, bladder cancer, colon cancer, prostate cancer, uterine cancer, cervical cancer, ovarian cancer, esophageal cancer, stomach cancer, gastrointestinal cancer (GI), pancreatic cancer, laryngeal cancer, and lung cancer.

[0045] Various definitions and aspects of the invention will be described below, but the invention is not limited to any specific embodiments that may be used for illustrative or exemplary purposes.

[0046] According to the present invention, in general, the biological activity or biological action of a protein refers to any function(s) exhibited or performed by the protein that is ascribed to the naturally occurring form of the protein as measured or observed in vivo (i.e., in the natural physiological environment of the protein) or in vitro (i.e., under laboratory conditions). Modifications of a protein, such as in a homologue or mimetic (discussed below), may result in proteins having the same biological activity as the naturally occurring protein, or in proteins having decreased or increased biological activity as compared to the naturally occurring protein. Modifications which result in a decrease in protein expression or a decrease in the activity of the protein, can be referred to as inactivation (complete or partial), down-regulation, or decreased action of a protein. Similarly, modifications which result in an increase in protein expression or an increase in the activity of the protein, can be referred to as amplification, overproduction, activation, enhancement, up-regulation or increased action of a protein.

[0047] According to the present invention, a “downstream gene” or “endpoint gene” is any gene, the expression of which is regulated (up or down) within a gefitinib sensitive or resistant cell. Selected sets of one, two, and preferably several or many of the genes (up to the number equivalent to all of the genes) of this invention can be used as end-points for rapid screening of patient cells for sensitivity or resistance to EGFR inhibitors such as gefitinib and for the other methods as described herein, including the identification of novel targets for the development of new cancer therapeutics.

[0048] As used herein, the term “homologue” is used to refer to a protein or peptide which differs from a naturally occurring protein or peptide (i.e., the “prototype” or “wild-type” protein) by minor modifications to the naturally occurring protein or peptide, but which maintains the basic protein and side chain structure of the naturally occurring form. Such changes include, but are not limited to: changes in one or a few amino acid side chains; changes one or a few amino acids, including deletions (e.g., a truncated version of the protein or peptide) insertions and/or substitutions; changes in stereochemistry of one or a few atoms; and/or minor derivatizations, including but not limited to: methylation, glycosylation, phosphorylation, acetylation, myristoylation, prenylation, palmitation, amidation and/or addition of glycosylphosphatidyl inositol. A homologue can have either 5 enhanced, decreased, or substantially similar properties as compared to the naturally occurring protein or peptide. A homologue can include an agonist of a protein or an antagonist of a protein.

[0049] Homologues can be the result of natural allelic variation or natural mutation. A naturally occurring allelic variant of a nucleic acid encoding a protein is a gene that occurs at essentially the same locus (or loci) in the genome as the gene which encodes such protein, but which, due to natural variations caused by, for example, mutation or recombination, has a similar but not identical sequence. Allelic variants typically encode proteins having similar activity to that of the protein encoded by the gene to which they are being compared. One class of allelic variants can encode the same protein but have different nucleic acid sequences due to the degeneracy of the genetic code. Allelic variants can also comprise alterations in the 5′ or 3′ untranslated regions of the gene (e.g., in regulatory control regions). Allelic variants are well known to those skilled in the art.

[0050] An agonist can be any compound which is capable of mimicking, duplicating or approximating the biological activity of a naturally occurring or specified protein, for example, by associating with (e.g., binding to) or activating a protein (e.g., a receptor) to which the natural protein binds, so that activity that would be produced with the natural protein is stimulated, induced, increased, or enhanced. For example, an agonist can include, but is not limited to, a protein, compound, or an antibody that selectively binds to and activates or increases the activation of a receptor bound by the natural protein, other homologues of the natural protein, and any suitable product of drug design that is characterized by its ability to agonize (e.g., stimulate, induce, increase, enhance) the biological activity of a naturally occurring protein.

[0051] An antagonist refers to any compound or agent which is capable of acting in a manner that is antagonistic to (e.g., against, a reversal of, contrary to) the action of the natural agonist, for example by interacting with another protein or molecule in a manner that the biological activity of the naturally occurring protein or agonist is decreased (e.g., reduced, inhibited, blocked). Such a compound can include, but is not limited to, an antibody that selectively binds to and blocks access to a protein by its natural ligand, or reduces or inhibits the activity of a protein, a product of drug design that blocks the protein or reduces the biological activity of the protein, an anti-sense nucleic acid molecule that binds to a nucleic acid molecule encoding the protein and prevents expression of the protein, a ribozyme that binds to the RNA and prevents expression of 5 the protein, RNAi, an aptamer, and a soluble protein, which competes with a natural receptor or ligand.

[0052] Agonists and antagonists that are products of drug design can be produced using various methods known in the art. Various methods of drug design, useful to design mimetics or other compounds useful in the present invention are disclosed in Maulik et al., 1997, Molecular Biotechnology: Therapeutic Applications and Strategies, Wiley-Liss, Inc., which is incorporated herein by reference in its entirety. An agonist or antagonist can be obtained, for example, from molecular diversity strategies (a combination of related strategies allowing the rapid construction of large, chemically diverse molecule libraries), libraries of natural or synthetic compounds, in particular from chemical or combinatorial libraries (i.e., libraries of compounds that differ in sequence or size but that have the similar building blocks) or by rational, directed or random drug design. See for example, Maulik et al., supra.

[0053] In a molecular diversity strategy, large compound libraries are synthesized, for example, from peptides, oligonucleotides, natural or synthetic steroidal compounds, carbohydrates and/or natural or synthetic organic and non-steroidal molecules, using biological, enzymatic and/or chemical approaches. The critical parameters in developing a molecular diversity strategy include subunit diversity, molecular size, and library diversity. The general goal of screening such libraries is to utilize sequential application of combinatorial selection to obtain high-affinity ligands for a desired target, and then to optimize the lead molecules by either random or directed design strategies. Methods of molecular diversity are described in detail in Maulik, et al., ibid.

[0054] As used herein, the term “mimetic” is used to refer to any natural or synthetic compound, peptide, oligonucleotide, carbohydrate and/or natural or synthetic organic molecule that is able to mimic the biological action of a naturally occurring or known synthetic compound.

[0055] As used herein, the term “putative regulatory compound” or “putative regulatory ligand” refers to compounds having an unknown regulatory activity, at least with respect to the ability of such compounds to regulate the expression or biological activity of a gene or protein encoded thereby, or to regulate sensitivity or resistance to an EGFR inhibitor as encompassed by the present invention.

[0056] In accordance with the present invention, an isolated polynucleotide, which phrase can be used interchangeably with “an isolated nucleic acid molecule”, is a nucleic acid 5 molecule that has been removed from its natural milieu (i.e., that has been subject to human manipulation), its natural milieu being the genome or chromosome in which the nucleic acid molecule is found in nature. As such, “isolated” does not necessarily reflect the extent to which the nucleic acid molecule has been purified, but indicates that the molecule does not include an entire genome or an entire chromosome in which the nucleic acid molecule is found in nature. Polynucleotides useful in the plurality of polynucleotides of the present invention (described below) are typically a portion of a gene or transcript thereof of the present invention that is suitable for use, for example, as a hybridization probe or PCR primer for the identification of a full-length gene, a transcript thereof, or a polynucleotide derived from the gene or transcript (e.g., cDNA), in a given sample (e.g., a cell sample). An isolated nucleic acid molecule can include a gene or a portion of a gene (e.g., the regulatory region or promoter), for example, to produce a reporter construct according to the present invention. An isolated nucleic acid molecule that includes a gene is not a fragment of a chromosome that includes such gene, but rather includes the coding region and regulatory regions associated with the gene, but no additional genes naturally found on the same chromosome. An isolated nucleic acid molecule can also include a specified nucleic acid sequence flanked by (i.e., at the 51 and/or the 3′ end of the sequence) additional nucleic acids that do not normally flank the specified nucleic acid sequence in nature (i.e., heterologous sequences). Isolated nucleic acid molecules can include DNA, RNA (e.g., MRNA), or derivatives of either DNA or RNA (e.g., cDNA). Although the phrase “nucleic acid molecule” or “polynucleotide” primarily refers to the physical nucleic acid molecule and the phrase “nucleic acid sequence” primarily refers to the sequence of nucleotides on the nucleic acid molecule, the two phrases can be used interchangeably, especially with respect to a nucleic acid molecule, or a nucleic acid sequence, being capable of encoding a protein.

[0057] Preferably, an isolated nucleic acid molecule of the present invention is produced using recombinant DNA technology (e.g., polymerase chain reaction (PCR) amplification, cloning) or chemical synthesis. Isolated nucleic acid molecules include natural nucleic acid molecules and homologues thereof, including, but not limited to, natural allelic variants and modified nucleic acid molecules in which nucleotides have been inserted, deleted, substituted, and/or inverted in such a manner that such modifications provide the desired effect on the biological activity of the protein as described herein. Protein homologues (e.g., proteins encoded by nucleic acid homologues) have been discussed in detail above.

[0058] The minimum size of a nucleic acid molecule or polynucleotide of the present invention is a size sufficient to encode a protein having a desired biological activity, sufficient to form a probe or oligonucleotide primer that is capable of forming a stable hybrid with the complementary sequence of a nucleic acid molecule encoding the natural protein (e.g., under moderate, high or very high stringency conditions), or to otherwise be used as a target in an assay or in any therapeutic method discussed herein. If the polynucleotide is an oligonucleotide probe or primer, the size of the polynucleotide can be dependent on nucleic acid composition and percent homology or identity between the nucleic acid molecule and a complementary sequence as well as upon hybridization conditions per se (e.g., temperature, salt concentration, and formamide concentration). The minimum size of a polynucleotide that is used as an oligonucleotide probe or primer is at least about 5 nucleotides in length, and preferably ranges from about 5 to about 50 or about 500 nucleotides, including any length in between, in whole number increments (i.e., 5, 6, 7, 8, 9, 10, . . . 33, 34, . . . 256, 257, . . . 500), and more preferably from about 10 to about 40 nucleotides, and most preferably from about 15 to about 40 nucleotides in length. Additional polynucleotide probes can be about 500 nucleotides, about 750 nucleotide, about 1000 nucleotides, about 2000 nucleotides, about 5000 nucleotides, or about 10,000 nucleotides. In one aspect, the oligonucleotide primer or probe is typically at least about 12 to about 15 nucleotides in length if the nucleic acid molecules are GC-rich and at least about 15 to about 18 bases in length if they are AT-rich. There is no limit, other than a practical limit, on the maximal size of a nucleic acid molecule of the present invention, in that the nucleic acid molecule can include a portion of a protein-encoding sequence or a nucleic acid sequence encoding a full-length protein.

[0059] An isolated protein, according to the present invention, is a protein (including a peptide) that has been removed from its natural milieu (i.e., that has been subject to human manipulation) and can include purified proteins, partially purified proteins, recombinantly produced proteins, and synthetically produced proteins, for example. As such, “isolated” does not reflect the extent to which the protein has been purified. An isolated protein useful as an antagonist or agonist according to the present invention can be isolated from its natural source, produced recombinantly or produced synthetically.

[0060] Smaller peptides useful as regulatory peptides are typically produced synthetically by methods well known to those of skill in the art.

[0061] According to the present invention, the phrase “selectively binds to” refers to the ability of an antibody, antigen binding fragment or binding partner (antigen binding peptide) to preferentially bind to specified proteins. More specifically, the phrase “selectively binds” refers to the specific binding of one protein to another (e.g., an antibody, fragment thereof, or binding partner to an antigen), wherein the level of binding, as measured by any standard assay (e.g., an immunoassay), is statistically significantly higher than the background control for the assay. For example, when performing an immunoassay, controls typically include a reaction well/tube that contain antibody or antigen binding fragment alone (i.e., in the absence of antigen), wherein an amount of reactivity (e.g., non-specific binding to the well) by the antibody or antigen binding fragment thereof in the absence of the antigen is considered to be background. Binding can be measured using a variety of methods standard in the art including enzyme immunoassays (e.g., ELISA), immunoblot assays, etc.).

[0062] In some embodiments of the present invention, a compound is contacted with one or more nucleic acids or proteins. Such methods can include cell-based assays, or non-cell-based assay. In one embodiment, a target gene is expressed by a cell (i.e., a cell-based assay). In one embodiment, the conditions under which a cell expressing a target is contacted with a putative regulatory compound, such as by mixing, are conditions in which the expression or biological activity of the target (gene or protein encoded thereby) is not stimulated (activated) if essentially no regulatory compound is present. For example, such conditions include normal culture conditions in the absence of a known activating compound or other equivalent stimulus. The putative regulatory compound is then contacted with the cell. In this embodiment, the step of detecting is designed to indicate whether the putative regulatory compound alters the expression and/or biological activity of the gene or protein target as compared to in the absence of the putative regulatory compound (i.e., the background level).

[0063] In accordance with the present invention, a cell-based assay as described herein is conducted under conditions which are effective to screen for regulatory compounds or to profile gene expression as described in the methods of the present invention. Effective conditions include, but are not limited to, appropriate media, temperature, pH and oxygen conditions that permit the growth of the cell that expresses the receptor. An appropriate, or effective, medium is typically a solid or liquid medium comprising growth factors and assimilable carbon, nitrogen and phosphate sources, as well as appropriate salts, minerals, metals and other nutrients, such as vitamins. Culturing is carried out at a temperature, pH and oxygen content appropriate for the cell. Such culturing conditions are within the expertise of one of ordinary skill in the art.

[0064] Cells that are useful in the cell-based assays of the present invention include any cell that expresses a gene that is to be investigated as a target, or in the diagnostic assays described herein, any cell that is isolated from a patient, including normal or malignant (tumor) cells.

[0065] According to the present invention, the method includes the step of detecting the expression of at least one, and preferably more than one, and most preferably, several, of the genes that are regulated differently in EGFR inhibitor-sensitive versus EGFR inhibitor-resistant cells, and particularly, of the genes that have now been shown to be regulated differently in gefitinib-sensitive versus gefitinib-resistant cells, by the present inventors. As used herein, the term “expression”, when used in connection with detecting the expression of a gene, can refer to detecting transcription of the gene and/or to detecting translation of the gene. To detect expression of a gene refers to the act of actively determining whether a gene is expressed or not. This can include determining whether the gene expression is upregulated as compared to a control, downregulated as compared to a control, or unchanged as compared to a control. Therefore, the step of detecting expression does not require that expression of the gene actually is upregulated or downregulated, but rather, can also include detecting that the expression of the gene has not changed (i.e., detecting no expression of the gene or no change in expression of the gene).

[0066] The present method includes the step of detecting the expression of at least one gene set forth in Table 1. In a preferred embodiment, the step of detecting includes detecting the expression of at least 2 genes, and preferably at least 3 genes, and more preferably at least 4 genes, and more preferably at least 5 genes, and more preferably at least 6 genes, and more preferably at least 7 genes, and more preferably at least 8 genes, and more preferably at least 9 genes, and more preferably at least 10 genes, and more preferably at least 11 genes, and more preferably at least 12 genes, and more preferably at least 13 genes, and more preferably at least 14 genes, and more preferably at least 15 genes, and so on, in increments of one (i.e., 1, 2, 3, . . . 12, 13, . . . 56, 57, . . . 78, 79 . . . ), up to detecting expression of all of the genes disclosed herein in Table 1. For example, in one aspect of the invention, the expression of at least five genes is detected, and in another aspect, the expression of at least 10 genes is detected, and in another aspect, the expression of at least 25 genes is detected, and in another aspect, the expression of at least 50 genes is detected, and in another aspect, the expression of at least 100 genes is detected, and in another aspect, the expression of at least 150 genes is detected. Preferably, larger numbers of genes in Table 1 are detected, as this will increase the sensitivity of the detection method. Analysis of a number of genes greater than 1 can be accomplished simultaneously, sequentially, or cumulatively.

[0067] In another embodiment of the invention, detecting in the sample the expression of one or more genes chosen from a panel of genes whose expression has been correlated with sensitivity or resistance to an EGFR inhibitor. For example, such genes can be identified using the methods for identifying the genes whose expression is correlated with gefitinib-resistance or sensitivity as described herein. In one aspect, the panel of genes is identified by a method comprising: (a) providing a sample of cells that are sensitive or resistant to treatment with the EGFR inhibitor; (b) detecting the expression of at least one gene in the EGFR inhibitor-sensitive cells as compared to the level of expression of the gene or genes in the EGFR inhibitor-resistant cells; and (c) identifying a gene or genes having a level of expression in EGFR inhibitor-sensitive cells that is statistically significantly different than the level of expression of the gene or genes in EGFR inhibitor-resistant cells, as potentially being a molecule that interacts with the EGFR pathway to allow or enhance responsiveness to EGFR inhibitors. The present invention is not intended to be limited solely to the biomarkers listed in Table 1. Rather, the biomarkers of Table 1 illustrate various aspects of the invention that can now be achieved given the discoveries by the inventors. Therefore, although many of the embodiments below are discussed in terms gefitinib, it is to be understood that the methods of the invention can be extended to other EGFR inhibitors, and particularly to those that are similar in structure and/or function to gefitinib, including agonists of gefitinib.

[0068] The first steps of the method to select a cancer patient that is predicted to benefit from therapeutic administration of an EGFR inhibitor, an agonist thereof, or a drug having substantially similar biological activity as EGFR inhibitor of the present invention, includes providing a patient sample (also called a test sample) and detecting in the sample the expression of a gene or genes. Suitable methods of obtaining a patient sample are known to a person of skill in the art. A patient sample can include any bodily fluid or tissue from a patient that may contain tumor cells or proteins of tumor cells. More specifically, according to the present invention, the term “test sample” or “patient sample” can be used generally to refer to a sample of any type which contains cells or products 5 that have been secreted from cells to be evaluated by the present method, including but not limited to, a sample of isolated cells, a tissue sample and/or a bodily fluid sample. According to the present invention, a sample of isolated cells is a specimen of cells, typically in suspension or separated from connective tissue which may have connected the cells within a tissue in vivo, which have been collected from an organ, tissue or fluid by any suitable method which results in the collection of a suitable number of cells for evaluation by the method of the present invention. The cells in the cell sample are not necessarily of the same type, although purification methods can be used to enrich for the type of cells that are preferably evaluated. Cells can be obtained, for example, by scraping of a tissue, processing of a tissue sample to release individual cells, or isolation from a bodily fluid.

[0069] A tissue sample, although similar to a sample of isolated cells, is defined herein as a section of an organ or tissue of the body which typically includes several cell types and/or cytoskeletal structure which holds the cells together. One of skill in the art will appreciate that the term “tissue sample” may be used, in some instances, interchangeably with a “cell sample”, although it is preferably used to designate a more complex structure than a cell sample. A tissue sample can be obtained by a biopsy, for example, including by cutting, slicing, or a punch. A bodily fluid sample, like the tissue sample, contains the cells to be evaluated for marker expression or biological activity and/or may contain a soluble biomarker that is secreted by cells, and is a fluid obtained by any method suitable for the particular bodily fluid to be sampled. Bodily fluids suitable for sampling include, but are not limited to, blood, mucous, seminal fluid, saliva, breast milk, bile and urine.

[0070] In general, the sample type (i.e., cell, tissue or bodily fluid) is selected based on the accessibility and structure of the organ or tissue to be evaluated for tumor cell growth and/or on what type of cancer is to be evaluated. For example, if the organ/tissue to be evaluated is the breast, the sample can be a sample of epithelial cells from a biopsy (i.e., a cell sample) or a breast tissue sample from a biopsy (a tissue sample). The sample that is most useful in the present invention will be cells, tissues or bodily fluids isolated from a patient by a biopsy or surgery or routine laboratory fluid collection.

[0071] Once a sample is obtained from the patient, the sample is evaluated for the detection of the expression of the gene or genes that have been correlated with sensitivity or resistance to an EGFR inhibitor (e.g., gefitinib) of the present invention. For example, as discussed above, any one or more of the genes in Table 1 comprising or expressing a transcript comprising one of SEQ ID NOs: 1-194 are useful for detection in the present method.

[0072] In one aspect, it may be desirable to select those genes for detection that are particularly highly regulated in gefitinib-sensitive cells versus gefitinib-resistant cells in that they display the largest increases or decreases in expression levels. The detection of such genes can be advantageous because the endpoint may be more clear and require less quantitation. The relative expression levels of the genes identified in the present invention are listed in Table 1, and the genes are ranked in the Table. Therefore, one can easily select subsets of particularly highly regulated genes, or subsets of genes based on some other desired characteristic to provide a more robust, sensitive, or selective assay.

[0073] In one embodiment, one of skill in the art might choose to detect genes that exhibited a fold increase above background of at least 2. In another embodiment, one of skill in the art might choose to detect genes that exhibited a fold increase or decrease above background of at least 3, and in another embodiment at least 4, and in another embodiment at least 5, and in another embodiment at least 6, and in another embodiment at least 7, and in another embodiment at least 8, and in another embodiment at least 9, and in another embodiment at least 10 or higher fold changes. It is noted that fold increases or decreases are not typically compared from one gene to another, but with reference to the background level for that particular gene.

[0074] In one aspect of the method of the present invention, the step of detecting can include the detection of expression of one or more of the genes of this invention. Expression of transcripts and/or proteins is measured by any of a variety of known methods in the art. For RNA expression, methods include but are not limited to: extraction of cellular mRNA and Northern blotting using labeled probes that hybridize to transcripts encoding all or part of one or more of the genes of this invention; amplification of MRNA expressed from one or more of the genes of this invention using gene-specific primers, polymerase chain reaction (PCR), and reverse transcriptase-polymerase chain reaction (RT-PCR), followed by quantitative detection of the product by any of a variety of means; extraction of total RNA from the cells, which is then labeled and used to probe cDNAs or oligonucleotides encoding all or part of the genes of this invention, arrayed on any of a variety of surfaces; in situ hybridization; and detection of a reporter gene.

[0075] In addition to general expression of a gene, the number of copies of a gene in a cancer cell/cells or tissue can be determined with nucleic acid probes to the genes. In one embodiment, Fluorescent in situ hybridization (FISH) can be used to detect the number of copies of a gene in a cancerous cell can be indicative of resistance or sensitivity to a compound. Established hybridization techniques such as FISH are contemplated herein. In one embodiment, the number of EGFR genes within a cancerous tissue or cell are detected using a FISH assay for the EGFR gene. Other non-limiting examples of genes that can be detected by FISH include E-cadherin and Her3. Additional genes for which knowledge of the extent of polysomy is desired will be known in the art and are contemplated herein.

[0076] Methods to measure protein expression levels generally include, but are not limited to: Western blot, immunoblot, enzyme-linked immunosorbant assay (ELISA), radioimmunoassay (RIA), immunoprecipitation, surface plasmon resonance, chemiluminescence, fluorescent polarization, phosphorescence, immunohistochemical analysis, matrix-assisted laser desorption/ionization time-of-flight (MALDI-TOF) mass spectrometry, microcytometry, microarray, microscopy, fluorescence activated cell sorting (FACS), and flow cytometry, as well as assays based on a property of the protein including but not limited to enzymatic activity or interaction with other protein partners. Binding assays are also well known in the art. For example, a BIAcore machine can be used to determine the binding constant of a complex between two proteins. The dissociation constant for the complex can be determined by monitoring changes in the refractive index with respect to time as buffer is passed over the chip (O'Shannessy et al. Anal. Biochem. 212:457 (1993); Schuster et al., Nature 365:343 (1993)). Other suitable assays for measuring the binding of one protein to another include, for example, immunoassays such as enzyme linked immunoabsorbent assays (ELISA) and radioimmunoassays (RIA); or determination of binding by monitoring the change in the spectroscopic or optical properties of the proteins through fluorescence, UV absorption, circular dichroism, or nuclear magnetic resonance (NMR).

[0077] In one embodiment, immunohistochemistry (IHC) is used to determine the expression of a gene in a cancerous tissue or cell as an indicator of said cancer's sensitivity to EGFR inhibitors. Examples of genes whose expression is detected by IHC include EGFR, ErbB3, E-cadherein, and Her3. Other genes' expression as indicators of sensitivity and/or resistance to EGFR inhibitors can be determined as described herein.

[0078] Nucleic acid arrays are particularly useful for detecting the expression of the genes of the present invention. The production and application of high-density arrays in gene expression monitoring have been disclosed previously in, for example, WO 97/10365; WO 92/10588; U.S. Pat. No. 6,040,138; U.S. Pat. No. 5,445,934; or WO95/35505, all of which are incorporated herein by reference in their entireties. Also for examples of arrays, see Hacia et al. (1996) Nature Genetics 14:441-447; Lockhart et al. (1996) Nature Biotechnol. 14:1675-1680; and De Risi et al. (1996) Nature Genetics 14:457-460. In general, in an array, an oligonucleotide, a cDNA, or genomic DNA, that is a portion of a known gene occupies a known location on a substrate. A nucleic acid target sample is hybridized with an array of such oligonucleotides and then the amount of target nucleic acids hybridized to each probe in the array is quantified. One preferred quantifying method is to use confocal microscope and fluorescent labels. The Affymetrix GeneChip™ Array system (Affymetrix, Santa Clara, Calif.) and the Atlas™ Human cDNA Expression Array system are particularly suitable for quantifying the hybridization; however, it will be apparent to those of skill in the art that any similar systems or other effectively equivalent detection methods can also be used. In a particularly preferred embodiment, 5 one can use the knowledge of the genes described herein to design novel arrays of polynucleotides, cDNAs or genomic DNAs for screening methods described herein. Such novel pluralities of polynucleotides are contemplated to be a part of the present invention and are described in detail below.

[0079] Suitable nucleic acid samples for screening on an array contain transcripts of interest or nucleic acids derived from the transcripts of interest. As used herein, a nucleic acid derived from a transcript refers to a nucleic acid for whose synthesis the mRNA transcript or a subsequence thereof has ultimately served as a template. Thus, a cDNA reverse transcribed from a transcript, an RNA transcribed from that cDNA, a DNA amplified from the cDNA, an RNA transcribed from the amplified DNA, etc., are all derived from the transcript and detection of such derived products is indicative of the presence and/or abundance of the original transcript in a sample. Thus, suitable samples include, but are not limited to, transcripts of the gene or genes, cDNA reverse transcribed from the transcript, cRNA transcribed from the cDNA, DNA amplified from the genes, RNA transcribed from amplified DNA, and the like. Preferably, the nucleic acids for screening are obtained from a homogenate of cells or tissues or other biological samples. Preferably, such sample is a total RNA preparation of a biological sample. More preferably in some embodiments, such a nucleic acid sample is the total mRNA isolated from a biological sample. Biological samples may be of any biological tissue or fluid or cells from any organism. Frequently the sample will be a “clinical sample” which is a sample derived from a patient, such as a lung tumor sample from a patient. Typical clinical samples include, but are not limited to, sputum, blood, blood cells (e.g., white cells), tissue or fine needle biopsy samples, urine, peritoneal fluid, and pleural fluid, or cells therefrom. Biological samples may also include sections of tissues, such as frozen sections or formalin fixed sections taken for histological purposes.

[0080] In one embodiment, it is desirable to amplify the nucleic acid sample prior to hybridization. One of skill in the art will appreciate that whatever amplification method is used, if a quantitative result is desired, care must be taken to use a method that maintains or controls for the relative frequencies of the amplified nucleic acids to achieve quantitative amplification. Methods of “quantitative” amplification are well known to those of skill in the art. For example, quantitative PCR involves simultaneously co-amplifying a known quantity of a control sequence using the same primers. This provides an internal standard that may be used to calibrate the PCR reaction. The high-density array may then include probes specific to the internal standard for quantification of the amplified nucleic acid. Other suitable amplification methods include, but are not limited to polymerase chain reaction (PCR) Innis, et al., PCR Protocols, A guide to Methods and Application. Academic Press, Inc. San Diego, (1990)), ligase chain reaction (LCR) (see Wu and Wallace, Genomics, 4: 560 (1989), Landegren, et al., Science, 241: 1077 (1988) and Barringer, et al., Gene, 89: 117 (1990), transcription amplification (Kwoh, et al., Proc. Natl. Acad. Sci. USA, 86: 1173 (1989)), and self-sustained sequence replication (Guatelli, et al., Proc. Nat. Acad. Sci. USA, 87:1874 (1990)).

[0081] Nucleic acid hybridization simply involves contacting a probe and target nucleic acid under conditions where the probe and its complementary target can form stable hybrid duplexes through complementary base pairing. As used herein, hybridization conditions refer to standard hybridization conditions under which nucleic acid molecules are used to identify similar nucleic acid molecules. Such standard conditions are disclosed, for example, in Sambrook et al., Molecular Cloning: A Laboratory Manual, Cold Spring Harbor Labs Press, 1989. Sambrook et al., ibid., is incorporated by reference herein in its entirety (see specifically, pages 9.31-9.62). In addition, formulae to calculate the appropriate hybridization and wash conditions to achieve hybridization permitting varying degrees of mismatch of nucleotides are disclosed, for example, in Meinkoth et al., 1984, Anal. Biochem. 138, 267-284; Meinkoth et al., ibid., is incorporated by reference herein in its entirety. Nucleic acids that do not form hybrid duplexes are washed away from the hybridized nucleic acids and the hybridized nucleic acids can then be detected, typically through detection of an attached detectable label. It is generally recognized that nucleic acids are denatured by increasing the temperature or decreasing the salt concentration of the buffer containing the nucleic acids. Under low stringency conditions (e.g., low temperature and/or high salt) hybrid duplexes (e.g., DNA:DNA, RNA:RNA, or RNA:DNA) will form even where the annealed sequences are not perfectly complementary. Thus specificity of hybridization is reduced at lower stringency. Conversely, at higher stringency (e.g., higher temperature or lower salt) successful hybridization requires fewer mismatches.

[0082] High stringency hybridization and washing conditions, as referred to herein, refer to conditions which permit isolation of nucleic acid molecules having at least about 90% nucleic acid sequence identity with the nucleic acid molecule being used to probe in the hybridization reaction (i.e., conditions permitting about 10% or less mismatch of nucleotides). One of skill in the art can use the formulae in Meinkoth et al., 1984, Anal. Biochem. 138, 267-284 (incorporated herein by reference in its entirety) to calculate the appropriate hybridization and wash conditions to achieve these particular levels of nucleotide mismatch. Such conditions will vary, depending on whether DNA.-RNA or DNA:DNA hybrids are being formed. Calculated melting temperatures for DNA:DNA hybrids are 10° C. less than for DNA:RNA hybrids. In particular embodiments, stringent hybridization conditions for DNA:DNA hybrids include hybridization at an ionic strength of 6×SSC (0.9 M Na+) at a temperature of between about 20° C. and about 35° C., more preferably, between about 28° C. and about 40° C., and even more preferably, between about 35° C. and about 45° C. In particular embodiments, stringent hybridization conditions for DNA:RNA hybrids include hybridization at an ionic strength of 6×SSC (0.9 M Na+) at a temperature of between about 30° C. and about 45° C., more preferably, between about 38° C. and about 50° C., and even more preferably, between about 45° C. and about 55° C. These values are based on calculations of a melting temperature for molecules larger than about 100 nucleotides, 0% formamide and a G+C content of about 40%. Alternatively, Tm can be calculated empirically as set forth in Sambrook et al., supra, pages 9.31 to 9.62.

[0083] The hybridized nucleic acids are detected by detecting one or more labels attached to the sample nucleic acids. The labels may be incorporated by any of a number of means well known to those of skill in the art. Detectable labels suitable for use in the present invention include any composition detectable by spectroscopic, photochemical, biochemical, immunochemical, electrical, optical or chemical means. Useful labels in the present invention include biotin for staining with labeled streptavidin conjugate, magnetic beads (e.g., Dynabeads™, fluorescent dyes (e.g., fluorescein, texas red, rhodamine, green fluorescent protein, and the like), radiolabels (e.g., 3H, 125I, 35S, 14C, or 32P), enzymes (e.g., horse radish peroxidase, alkaline phosphatase and others commonly used in an ELISA), and colorimetric labels such as colloidal gold or colored glass or plastic (e.g., polystyrene, polypropylene, latex, etc.) beads. Means of detecting such labels are well known to those of skill in the art. Thus, for example, radiolabels may be detected using photographic film or scintillation counters, fluorescent markers may be detected using a photodetector to detect emitted light. Enzymatic labels are typically detected by providing the enzyme with a substrate and detecting the reaction product produced by the action of the enzyme on the substrate, and colorimetric labels are detected by simply visualizing the colored label.

[0084] The term “quantifying” or quantitating when used in the context of quantifying transcription levels of a gene can refer to absolute or to relative quantification. Absolute quantification may be accomplished by inclusion of known concentration(s) of one or more target nucleic acids and referencing the hybridization intensity of unknowns with the known target nucleic acids (e.g. through generation of a standard curve). Alternatively, relative quantification can be accomplished by comparison of hybridization signals between two or more genes, or between two or more treatments to quantify the changes in hybridization intensity and, by implication, transcription level.

[0085] In one aspect of the present method, in vitro cell based assays may be designed to screen for compounds that affect the regulation of genes at either the transcriptional or translational level. One, two or more promoters of the genes of this invention can be used to screen unknown compounds for activity on a given target. Promoters of the selected genes can be linked to any of several reporters (including but not limited to chloramphenicol acetyl transferase, or luciferase) that measure transcriptional read-out. The promoters can be tested as pure DNA, or as DNA bound to chromatin proteins.

[0086] In one aspect of the present method, the step of detecting can include detecting the expression of one or more genes of the invention in intact animals or tissues obtained from such animals. Mammalian (i.e. mouse, rat, monkey) or non-mammalian (i.e. chicken) species can be the test animals. Sample tissues from a patient can also be screened. The tissues to be surveyed can be either normal or malignant tissues. The presence and quantity of endogenous mRNA or protein expression of one or more of the genes of this invention can be measured in those tissues. The gene markers can be measured in tissues that are fresh, frozen, fixed or otherwise preserved. They can be measured in cytoplasmic or nuclear organ-, tissue- or cell-extracts; or in cell membranes including but not limited to plasma, cytoplasmic, mitochondrial, golgi or nuclear membranes; in the nuclear matrix; or in cellular organelles and their extracts including but not limited to ribosomes, nuclei, nucleoli, mitochondria, or golgi. Assays for endogenous expression of mRNAs or proteins encoded by the genes of this invention can be performed as described above. Alternatively, intact transgenic animals can be generated for screening for research or validation purposes.

[0087] Preferably, a gene identified as being upregulated or downregulated in a test cell according to the invention (including a sample tumor cell to be screened) is regulated in the same direction and to at least about 5%, and more preferably at least about 10%, and more preferably at least 20%, and more preferably at least 25%, and more preferably at least 30%, and more preferably at least 35%, and more preferably at least 40%, and more preferably at least 45%, and more preferably at least 50%, and preferably at least 55%, and more preferably at least 60%, and more preferably at least 65%, and more preferably at least 70%, and more preferably at least 75%, and more preferably at least 80%, and more preferably at least 85%, and more preferably at least 90%, and more preferably at least 95%, and more preferably of 100%, or any percentage change between 5% and higher in 1% increments (i.e., 5%, 6%, 7%, 8% . . . ), of the level of expression of the gene that is seen in established or confirmed gefitinib-sensitive or gefitinib-resistant cells. A gene identified as being upregulated or downregulated in a test cell according to the invention can also be regulated in the same direction and to a higher level than the level of expression of the gene that is seen in established or confirmed gefitinib-sensitive or gefitinib-resistant cells.

[0088] The values obtained from the test and/or control samples are statistically processed using any suitable method of statistical analysis to establish a suitable baseline level using methods standard in the art for establishing such values. Statistical significance according to the present invention should be at least p<0.05.

[0089] It will be appreciated by those of skill in the art that differences between the expression of genes in sensitive versus resistant cells may be small or large. Some small differences may be very reproducible and therefore nonetheless useful. For other purposes, large differences may be desirable for ease of detection of the activity. It will be therefore appreciated that the exact boundary between what is called a positive result and a negative result can shift, depending on the goal of the screening assay and the genes to be screened. For some assays it may be useful to set threshold levels of change. One of skill in the art can readily determine the criteria for screening of cells given the information provided herein.

[0090] The presence and quantity of each gene marker can be measured in primary tumors, metastatic tumors, locally recurring tumors, ductal carcinomas in situ, or other tumors. The markers can be measured in solid tumors that are fresh, frozen, fixed or otherwise preserved. They can be measured in cytoplasmic or nuclear tumor extracts; or in tumor membranes including but not limited to plasma, mitochondrial, golgi or nuclear membranes; in the nuclear matrix; or in tumor cell organelles and their extracts including 5 but not limited to ribosomes, nuclei, mitochondria, golgi.

[0091] The level of expression of the gene or genes detected in the test or patient sample f the invention is compared to a baseline or control level of expression of that gene. More specifically, according to the present invention, a “baseline level” is a control level of biomarker expression against which a test level of biomarker expression (i.e., in the test sample) can be compared. In the present invention, the control level of biomarker expression can be the expression level of the gene or genes in a control cell that is sensitive to the EGFR inhibitor, and/or the expression level of the gene or genes in a control cell that is resistant to the EGFR inhibitor. Other controls may also be included in the assay. In one embodiment, the control is established in an autologous control sample obtained from the patient. The autologous control sample can be a sample of isolated cells, a tissue sample or a bodily fluid sample, and is preferably a cell sample or tissue sample. According to the present invention, and as used in the art, the term “autologous” means that the sample is obtained from the same patient from which the sample to be evaluated is obtained. The control sample should be of or from the same cell type and preferably, the control sample is obtained from the same organ, tissue or bodily fluid as the sample to be evaluated, such that the control sample serves as the best possible baseline for the sample to be evaluated. In one embodiment, control expression levels of the gene or genes that has been correlated with sensitivity and/or resistance to the EGFR inhibitor has been predetermined, such as in Table 1. Such a form of stored information can include, for example, but is not limited to, a reference chart, listing or electronic file of gene expression levels and profiles for EGFR inhibitor sensitive and/or EGFR inhibitor resistant biomarker expression, or any other source of data regarding baseline biomarker expression that is useful in the method of the invention. Therefore, it can be determined, based on the control or baseline level of biomarker expression or biological activity, whether the expression level of a gene or genes in a patient sample is/are more statistically significantly similar to the baseline for EGFR resistance or EGFR sensitivity. A profile of individual gene markers, including a matrix of two or more markers, can be generated by one or more of the methods described above. According to the present invention, a profile of the genes in a tissue sample refers to a reporting of the expression level of a given gene from Table 1, and includes a classification of the gene with regard to how the gene is regulated in gefitinib-sensitive versus gefitinib-resistant cells. The data can be reported as raw data, and/or statistically analyzed by any of a variety of methods, and/or combined with any other prognostic marker(s).

[0092] Another embodiment of the present invention relates to a plurality of polynucleotides for the detection of the expression of genes as described herein. The plurality of polynucleotides consists of polynucleotides that are complementary to RNA transcripts, or nucleotides derived therefrom, of genes listed in Table 1 or otherwise identified as being useful according to the present invention (e.g., other genes correlated with sensitivity or resistance to gefitinib or another EGFR inhibitor), and is therefore distinguished from previously known nucleic acid arrays and primer sets. The plurality of polynucleotides within the above-limitation includes at least two or more polynucleotides that are complementary to RNA transcripts, or nucleotides derived therefrom, of one or more genes identified by the present inventors and listed in Table 1. Preferably, the plurality of polynucleotides is capable of detecting expression of at least two, and more preferably at least five, and more preferably at least 10, and more preferably at least 25, and more preferably at least 50, and more preferably at least 100, and more preferably at least 150, and more preferably all of the genes (or any number in between two and all of the genes, in whole increments) in a panel of genes correlated with EGFR inhibitor sensitivity and/or resistance, such as all of the genes listed in Table 1.

[0093] In one embodiment, it is contemplated that additional genes that are not regulated differently in gefitinib-sensitive versus gefitinib-resistant cells can be added to the plurality of polynucleotides. Such genes would not be random genes, Or large groups of unselected human genes, as are commercially available now, but rather, would be specifically selected to complement the sets of genes identified by the present invention. For example, one of skill in the art may wish to add to the above-described plurality of genes one or more genes that are of relevance because they are expressed by a particular tissue of interest (e.g., lung tissue), are associated with a particular disease or condition of interest (e.g., NSCLC), or are associated with a particular cell, tissue or body function (e.g., angiogenesis). The development of additional pluralities of polynucleotides (and antibodies, as disclosed below), which include both the above-described plurality and such additional selected polynucleotides, are explicitly contemplated by the present invention.

[0094] According to the present invention, a plurality of polynucleotides refers to at least 2, and more preferably at least 3, and more preferably at least 4, and more preferably at least 5, and more preferably at least 6, and more preferably at least 7, and more preferably at least 8, and more preferably at least 9, and more preferably at least 10, and so on, in increments of one, up to any suitable number of polynucleotides, including at least 100, 500, 1000, 104, 105, or at least 106 or more polynucleotides.

[0095] In one embodiment, the polynucleotide probes are conjugated to detectable markers. Detectable labels suitable for use in the present invention include any composition detectable by spectroscopic, photochemical, biochemical, immunochemical, electrical, optical or chemical means. Useful labels in the present invention include biotin for staining with labeled streptavidin conjugate, magnetic beads (e.g., Dynabeads.™.), fluorescent dyes (e.g., fluorescein, texas red, rhodamine, green fluorescent protein, and the like), radiolabels (e.g., 3H, 125I, 35S, 14C, or 32P), enzymes (e.g., horse radish peroxidase, alkaline phosphatase and others commonly used in an ELISA), and colorimetric labels such as colloidal gold or colored glass or plastic (e.g., polystyrene, polypropylene, latex, etc.) beads. Preferably, the polynucleotide probes are immobilized on a substrate.

[0096] In one embodiment, the polynucleotide probes are hybridizable array elements in a microarray or high density array. Nucleic acid arrays are well known in the art and are described for use in comparing expression levels of particular genes of interest, for example, in U.S. Pat. No. 6,177,248, which is incorporated herein by reference in its entirety. Nucleic acid arrays are suitable for quantifying a small variations in expression levels of a gene in the presence of a large population of heterogeneous nucleic acids. Knowing the identity of the genes of the present invention, nucleic acid arrays can be fabricated either by de novo synthesis on a substrate or by spotting or transporting nucleic acid sequences onto specific locations of substrate. Nucleic acids are purified and/or isolated from biological materials, such as a bacterial plasmid containing a cloned segment of sequence of interest. It is noted that all of the genes identified by the present invention have been previously sequenced, at least in part, such that oligonucleotides suitable for the identification of such nucleic acids can be produced. The database accession number for each of the genes identified by the present inventors is provided in Table 1. Suitable nucleic acids are also produced by amplification of template, such as by polymerase chain reaction or in vitro transcription.

[0097] Synthesized oligonucleotide arrays are particularly preferred for this aspect of the invention. Oligonucleotide arrays have numerous advantages, as opposed to other methods, such as efficiency of production, reduced intra- and inter array variability, increased information content and high signal-to-noise ratio.

[0098] One of skill in the art will appreciate that an enormous number of array designs are suitable for the practice of this invention. An array will typically include a number of probes that specifically hybridize to the sequences of interest. In addition, in a preferred embodiment, the array will include one or more control probes. The high-density array chip includes “test probes.” Test probes could be oligonucleotides that range from about 5 to about 45 or 5 to about 500 nucleotides (including any whole number increment in between), more preferably from about 10 to about 40 nucleotides and most preferably from about 15 to about 40 nucleotides in length. In other particularly preferred embodiments the probes are 20 or 25 nucleotides in length. In another preferred embodiments, test probes are double or single strand DNA sequences. DNA sequences are isolated or cloned from natural sources or amplified from natural sources using natural nucleic acids as templates, or produced synthetically. These probes have sequences complementary to particular subsequences of the genes whose expression they are designed to detect. Thus, the test probes are capable of specifically hybridizing to the target nucleic acid they are to detect.

[0099] Another embodiment of the present invention relates to a plurality of antibodies, or antigen binding fragments thereof, for the detection of the expression of genes according to the present invention. The plurality of antibodies, or antigen binding fragments thereof, consists of antibodies, or antigen binding fragments thereof, that selectively bind to proteins encoded by genes described herein. According to the present invention, a plurality of antibodies, or antigen binding fragments thereof, refers to at least 2, and more preferably at least 3, and more preferably at least 4, and more preferably at least 5, and more preferably at least 6, and more preferably at least 7, and more preferably at least 8, and more preferably at least 9, and more preferably at least 10, and so on, in increments of one, up to any suitable number of antibodies, or antigen binding fragments thereof, including at least 100, 500, or at least 1000 antibodies, or antigen binding fragments thereof.

[0100] The invention also extends to non-antibody polypeptides, sometimes referred to as binding partners or antigen binding peptides, that have been designed to bind specifically to, and either activate or inhibit as appropriate, a target protein. Examples of the design of such polypeptides, which possess a prescribed ligand specificity are given in Beste et al. (Proc. Natl. Acad. Sci. 96:1898-1903, 1999), incorporated herein by reference in its entirety.

[0101] Limited digestion of an immunoglobulin with a protease may produce two fragments. An antigen binding fragment is referred to as an Fab, an Fab′, or an F(ab′)2 fragment. A fragment lacking the ability to bind to antigen is referred to as an Fc fragment. An Fab fragment comprises one arm of an immunoglobulin molecule containing a L chain (VL+CL domains) paired with the VH region and a portion of the Ch region (CHI domain). An Fab′ fragment corresponds to an Fab fragment with part of the hinge region attached to the CHI domain. An F(ab′)2 fragment corresponds to two Fab′ fragments that are normally covalently linked to each other through a di-sulfide bond, typically in the hinge regions.

[0102] Isolated antibodies of the present invention can include serum containing such antibodies, or antibodies that have been purified to varying degrees. Whole antibodies of the present invention can be polyclonal or monoclonal. Alternatively, functional equivalents of whole antibodies, such as antigen binding fragments in which one or more antibody domains are truncated or absent (e.g., Fv, Fab, Fab′, or F(ab)2 fragments), as well as genetically-engineered antibodies or antigen binding fragments thereof, including single chain antibodies or antibodies that can bind to more than one epitope (e.g., bi-specific antibodies), or antibodies that can bind to one or more different antigens (e.g., bi-or multi-specific antibodies), may also be employed in the invention.

[0103] Generally, in the production of an antibody, a suitable experimental animal, such as, for example, but not limited to, a rabbit, a sheep, a hamster, a guinea pig, a mouse, a rat, or a chicken, is exposed to an antigen against which an antibody is desired. Typically, an animal is immunized with an effective amount of antigen that is injected into the animal. An effective amount of antigen refers to an amount needed to induce antibody production by the animal. The animal's immune system is then allowed to respond over a pre-determined period of time. The immunization process can be repeated until the immune system is found to be producing antibodies to the antigen. In order to obtain polyclonal antibodies specific for the antigen, serum is collected from the animal that contains the desired antibodies (or in the case of a chicken, antibody can be collected from the eggs). Such serum is useful as a reagent. Polyclonal antibodies can be further purified from the serum (or eggs) by, for example, treating the serum with ammonium sulfate.

[0104] Monoclonal antibodies may be produced according to the methodology of Kohler and Milstein (Nature 256:495-497, 1975). For example, B lymphocytes are recovered from the spleen (or any suitable tissue) of an immunized animal and then fused with myeloma cells to obtain a population of hybridoma cells capable of continual growth in suitable culture medium. Hybridomas producing the desired antibody are selected by testing the ability of the antibody produced by the hybridoma to bind to the desired antigen.

[0105] Finally, any of the genes of this invention, or their RNA or protein products, can serve as targets for therapeutic strategies. For example, neutralizing antibodies could be directed against one of the protein products of a selected gene, expressed on the surface of a tumor cell. Alternatively, regulatory compounds that regulate (e.g., upregulate or downregulate) the expression and/or biological activity of a target gene (whether the product is intracellular, membrane or secreted), can be identified and/or designed using the genes described herein. For example, in one aspect, a method of using the genes described herein as a target includes the steps of: (a) contacting a test compound with a cell that expresses at least one gene, wherein said gene is selected from any one of the genes comprising, or expressing a transcript comprising, a nucleic acid sequence selected from the group consisting of SEQ ID NOs: 1-194; and (b) identifying compounds, wherein the compounds can include: (i) compounds that increase the expression or activity of the gene or genes in (a), or the proteins encoded thereby, that are correlated with sensitivity to gefitinib; and (ii) compounds that decrease the expression or activity of genes in (a), or the proteins encoded thereby, that are correlated with resistance to gefitinib. The compounds are thereby identified as having the potential to enhance the efficacy of EGFR inhibitors.

[0106] The period of contact with the compound being tested can be varied depending on the result being measured, and can be determined by one of skill in the art. As used herein, the term “contact period” refers to the time period during which cells are in contact with the compound being tested. The term “incubation period” refers to the entire time during which cells are allowed to grow prior to evaluation, and can be inclusive of the contact period. Thus, the incubation period includes all of the contact period and may include a further time period during which the compound being tested is not present but during which expression of genes is allowed to continue prior to scoring. Methods to evaluate gene expression in a cell according to the present invention have been described previously herein.

[0107] If a suitable therapeutic compound is identified using the methods and genes of the present invention, a composition can be formulated. A composition, and particularly a therapeutic composition, of the present invention generally includes the therapeutic compound and a carrier, and preferably, a pharmaceutically acceptable carrier. According to the present invention, a “pharmaceutically acceptable carrier” includes pharmaceutically acceptable excipients and/or pharmaceutically acceptable delivery vehicles, which are suitable for use in administration of the composition to a suitable in vitro, ex vivo or in vivo site. A suitable in vitro, in vivo or ex vivo site is preferably a rumor cell. In some embodiments, a suitable site for delivery is a site of inflammation, near the site of a tumor, or a site of any other disease or condition in which regulation of the genes identified herein can be beneficial. Preferred pharmaceutically acceptable carriers are capable of maintaining a compound, a protein, a peptide, nucleic acid molecule or mimetic (drag) according to the present invention in a form that, upon arrival of the compound, protein, peptide, nucleic acid molecule or mimetic at the cell target in a culture or in patient, the compound, protein, peptide, nucleic acid molecule or mimetic is capable of interacting with its target.

[0108] Suitable excipients of the present invention include excipients or formularies that transport or help transport, but do not specifically target a composition to a cell (also referred to herein as non-targeting carriers). Examples of pharmaceutically acceptable excipients include, but are not limited to water, phosphate buffered saline, Ringer's solution, dextrose solution, serum-containing solutions, Hank's solution, other aqueous physiologically balanced solutions, oils, esters and glycols. Aqueous carriers can contain suitable auxiliary substances required to approximate the physiological conditions of the recipient, for example, by enhancing chemical stability and isotonicity.

[0109] Suitable auxiliary substances include, for example, sodium acetate, sodium chloride, sodium lactate, potassium chloride, calcium chloride, and other substances used to produce phosphate buffer, Tris buffer, and bicarbonate buffer. Auxiliary substances can also include preservatives, such as thimerosal, m- or o-cresol, formalin and benzol alcohol. Compositions of the present invention can be sterilized by conventional methods and/or lyophilized.

[0110] One type of pharmaceutically acceptable carrier includes a controlled release formulation that is capable of slowly releasing a composition of the present invention into a patient or culture. As used herein, a controlled release formulation comprises a compound of the present invention (e.g., a protein (including homologues), a drug, an antibody, a nucleic acid molecule, or a mimetic) in a controlled release vehicle. Suitable controlled release vehicles include, but are not limited to, biocompatible polymers, other polymeric matrices, capsules, microcapsules, microparticles, bolus preparations, osmotic pumps, diffusion devices, liposomes, lipospheres, and transdermal delivery systems. Other carriers of the present invention include liquids that, upon administration to a patient, form a solid or a gel in situ. Preferred carriers are also biodegradable (i.e., bioerodible). When the compound is a recombinant nucleic acid molecule, suitable delivery vehicles include, but are not limited to liposomes, viral vectors or other delivery vehicles, including ribozymes. Natural lipid-containing delivery vehicles include cells and cellular membranes. Artificial lipid-containing delivery vehicles include liposomes and micelles. A delivery vehicle of the present invention can be modified to target to a particular site in a patient, thereby targeting and making use of a compound of the present invention at that site. Suitable modifications include manipulating the chemical formula of the lipid portion of the delivery vehicle and/or introducing into the vehicle a targeting agent capable of specifically targeting a delivery vehicle to a preferred site, for example, a preferred cell type. Other suitable delivery vehicles include gold particles, poly-L-lysine/DNA-molecular conjugates, and artificial chromosomes.

[0111] A pharmaceutically acceptable carrier which is capable of targeting is herein referred to as a “delivery vehicle.” Delivery vehicles of the present invention are capable of delivering a composition of the present invention to a target site in a patient. A “target site” refers to a site in a patient to which one desires to deliver a composition. For example, a target site can be any cell which is targeted by direct injection or delivery using liposomes, viral vectors or other delivery vehicles, including ribozymes and antibodies. Examples of delivery vehicles include, but are not limited to, artificial and natural lipid-containing delivery vehicles, viral vectors, and ribozymes. Natural lipid-containing delivery vehicles include cells and cellular membranes. Artificial lipid-containing delivery vehicles include liposomes and micelles. A delivery vehicle of the present invention can be modified to target to a particular site in a subject, thereby targeting and making use of a compound of the present invention at that site. Suitable modifications include manipulating the chemical formula of the lipid portion of the delivery vehicle and/or introducing into the vehicle a compound capable of specifically 5 targeting a delivery vehicle to a preferred site, for example, a preferred cell type. Specifically, targeting refers to causing a delivery vehicle to bind to a particular cell by the interaction of the compound in the vehicle to a molecule on the surface of the cell. Suitable targeting compounds include ligands capable of selectively (i.e., specifically) binding another molecule at a particular site. Examples of such ligands include antibodies, antigens, receptors and receptor ligands. Manipulating the chemical formula of the lipid portion of the delivery vehicle can modulate the extracellular or intracellular targeting of the delivery vehicle. For example, a chemical can be added to the lipid formula of a liposome that alters the charge of the lipid bilayer of the liposome so that the liposome fuses with particular cells having particular charge characteristics.

[0112] Another preferred delivery vehicle comprises a viral vector. A viral vector includes an isolated nucleic acid molecule useful in the present invention, in which the nucleic acid molecules are packaged in a viral coat that allows entrance of DNA into a cell. A number of viral vectors can be used, including, but not limited to, those based on alphaviruses, poxviruses, adenoviruses, herpesviruses, lentiviruses, adeno-associated viruses and retroviruses.

[0113] A composition can be delivered to a cell culture or patient by any suitable method. Selection of such a method will vary with the type of compound being administered or delivered (i.e., compound, protein, peptide, nucleic acid molecule, or mimetic), the mode of delivery (i.e., in vitro, in vivo, ex vivo) and the goal to be achieved by administration/delivery of the compound or composition. According to the present invention, an effective administration protocol (i.e., administering a composition in an effective manner) comprises suitable dose parameters and modes of administration that result in delivery of a composition to a desired site (i.e., to a desired cell) and/or in the desired regulatory event.

[0114] Administration routes include in vivo, in vitro and ex vivo routes. In vivo routes include, but are not limited to, oral, nasal, intratracheal injection, inhaled, transdermal, rectal, and parenteral routes. Preferred parenteral routes can include, but are not limited to, subcutaneous, intradermal, intravenous, intramuscular and intraperitoneal routes.

[0115] Intravenous, intraperitoneal, intradermal, subcutaneous and intramuscular administrations can be performed using methods standard in the art. Aerosol (inhalation) delivery can also be performed using methods standard in the art (see, for example, Stribling et al., Proc. Natl. Acad. Sci. USA 189:11277-11281, 1992, which is incorporated herein by reference in its entirety). Oral delivery can be performed by complexing a therapeutic composition of the present invention to a carrier capable of withstanding degradation by digestive enzymes in the gut of an animal. Examples of such carriers, include plastic capsules or tablets, such as those known in the art. Direct injection techniques are particularly useful for suppressing graft rejection by, for example, injecting the composition into the transplanted tissue, or for site-specific administration of a compound, such as at the site of a tumor. Ex vivo refers to performing part of the regulatory step outside of the patient, such as by transfecting a population of cells removed from a patient with a recombinant molecule comprising a nucleic acid sequence encoding a protein according to the present invention under conditions such that the recombinant molecule is subsequently expressed by the transfected cell, and returning the transfected cells to the patient. In vitro and ex vivo routes of administration of a composition to a culture of host cells can be accomplished by a method including, but not limited to, transfection, transformation, electroporation, microinjection, lipofection, adsorption, protoplast fusion, use of protein carrying agents, use of ion carrying agents, use of detergents for cell permeabilization, and simply mixing (e.g., combining) a compound in culture with a target cell.

[0116] In the method of the present invention, a therapeutic compound, as well as compositions comprising such compounds, can be administered to any organism, and particularly, to any member of the Vertebrate class, Mammalia, including, without limitation, primates, rodents, livestock and domestic pets. Livestock include mammals to be consumed or that produce useful products (e.g., sheep for wool production). Preferred mammals to protect include humans. Typically, it is desirable to obtain a therapeutic benefit in a patient. A therapeutic benefit is not necessarily a cure for a particular disease or condition, but rather, preferably encompasses a result which can include alleviation of the disease or condition, elimination of the disease or condition, reduction of a symptom associated with the disease or condition, prevention or alleviation of a secondary disease or condition resulting from the occurrence of a primary disease or condition, and/or prevention of the disease or condition. As used herein, the phrase “protected from a disease” refers to reducing the symptoms of the disease; reducing the occurrence of the disease, and/or reducing the severity of the disease. Protecting a patient can refer to the ability of a composition of the present invention, when administered to a patient, to prevent a disease from occurring and/or to cure or to alleviate disease symptoms, signs or 5 causes. As such, to protect a patient from a disease includes both preventing disease occurrence (prophylactic treatment) and treating a patient that has a disease (therapeutic treatment) to reduce the symptoms of the disease. A beneficial effect can easily be assessed by one of ordinary skill in the art and/or by a trained clinician who is treating the patient. The term, “disease” refers to any deviation from the normal health of a mammal 10 and includes a state when disease symptoms are present, as well as conditions in which a deviation (e.g., infection, gene mutation, genetic defect, etc.) has occurred, but symptoms are not yet manifested.

[0117] Various aspects of the invention are described in the following examples; however, the following examples are provided for the purpose of illustration and are not intended to limit the scope of the present invention.

### EXAMPLES

### Example 1

[0118] The following example describes the identification of a biomarker panel that discriminates EGFR inhibitor-sensitive cell lines from EGFR inhibitor-resistant cell lines.

[0119] Methods: EGFR inhibitor sensitivity is determined in 18 NSCLC cell lines using MTT assays. Cell lines are classified as EGFR inhibitor sensitive (IC₅₀<1 μM), resistant (IC₅₀>10 μM) or intermediate sensitivity (10 μM<IC₅₀>1). Oligonucleotide gene arrays (Affymetrix® Human Genome U133 set, 39,000 genes) are done on 10 cell lines. Three distinct filtration and normalization algorithms to process the expression data are used, and a list of genes is generated that is both statistically significant (unadjusted p=0.001 cutoff) and corrected for false positive occurrence. This approach is used in combination with 5 distinct machine learning algorithms used to build a test set for predictor genes that are successful for 100% of the test cases. The best discriminators (>3 fold difference in expression between sensitive and resistant cell lines) are selected for Real-time RT-PCR.

[0120] Results: A list of genes is generated initially from the Affymetrix array analysis. By using the mathematical algorithm, 10-30 different candidate genes are selected for RT-PCR.

[0121] Conclusion: Based on NSCLC cell line studies it is possible to identify genes which strongly discriminate EGFR inhibitor sensitive cell lines (Table 1-Sensitive) from the EGFR inhibitor resistant cell lines (Table 1-Resistant). The genes are ranked in Table 1. This entire biomarker panel is of significant value for selecting NSCLC patients for EGFR inhibitor treatment.

TABLE 1

| | | | | |
|---|---|---|---|---|
| | parametric | Gene | Sequence | |
| Probe set | p-value | symbol | Identifier | Description |

Sensitive

| | | | | |
|---|---|---|---|---|
| 202286 s at | 0.00000005 | TACSTD2 | SEQ ID NO: 12 | tumor-associated calcium signal transducer 2 |
| 202489_s_at | 0.00000005 | FXYD3 | SEQ ID NO: 16 | FXYD domain containing ion transport regulator 3 |
| 213285 at | 0.00000005 | TMEM30B | SEQ ID NO: 73 | transmembrane protein 30B |
| 218186 at | 0.00000005 | RAB25 | SEQ ID NO: 83 | RAB25, member RAS oncogene family |
| 235515 at | 0.00000005 | FLJ36445 | SEQ ID NO: 168 | hypothetical protein FLJ36445 |
| 235988 at | 0.00000005 | GPR110 | SEQ ID NO: 170 | G protein-coupled receptor 110 |
| 238689 at | 0.00000005 | GPR110 | SEQ ID NO: 177 | G protein-coupled receptor 110 |
| 232165 at | 0.00000010 | EPPK1 | SEQ ID NO: 164 | epiplakin 1 |
| 240633 at | 0.00000010 | FLJ33718 | SEQ ID NO: 182 | hypothetical protein FLJ33718 |
| 229599_at | 0.00000020 | | SEQ ID NO: 154 | Clone IMAGE: 5166045, Mrna |
| 203397_s_at | 0.00000030 | GALNT3 | SEQ ID NO: 28 | UDP-N-acetyl-alpha-D-galactosamine:polypeptide N- |
| | | | | acetylgalactosaminyltransferase 3 (GalNAc-T3) |
| 232164 s at | 0.00000030 | EPPK1 | SEQ ID NO: 163 | epiplakin 1 |
| 227134 at | 0.00000160 | SYTL1 | SEQ ID NO: 143 | synaptotagmin-like 1 |
| 236489 at | 0.00000170 | | SEQ ID NO: 171 | |
| 235651 at | 0.00000480 | | SEQ ID NO: 169 | |
| 238439 at | 0.00000700 | ANKRD22 | SEQ ID NO: 173 | ankyrin repeat domain 22 |
| 219388 at | 0.00000730 | TFCP2L3 | SEQ ID NO: 91 | transcription factor CP2-like 3 |
| 227985 at | 0.00000820 | | SEQ ID NO: 146 | |
| 227450 at | 0.00000890 | FLJ32115 | SEQ ID NO: 144 | hypothetical protein FLJ32115 |
| 203256 at | 0.00000980 | CDH3 | SEQ ID NO: 23 | cadherin 3, type 1, P-cadherin (placental) |
| 220318 at | 0.00000980 | EPN3 | SEQ ID NO: 100 | epsin 3 |
| 202525 at | 0.00001030 | PRSS8 | SEQ ID NO: 17 | protease, serine, 8 (prostasin) |
| 227803_at | 0.00001080 | ENPP5 | SEQ ID NO: 145 | ectonudeotide pyrophosphatase/phosphodiesterase 5 (putative function) |
| 206884 s at | 0.00001200 | SCEL | SEQ ID NO: 49 | Sciellin |
| 223895 s at | 0.00001290 | EPN3 | SEQ ID NO: 119 | epsin 3 |
| 238493 at | 0.00001650 | ZNF506 | SEQ ID NO. 174 | zinc finger protein 506 |
| 201428 at | 0.00002330 | CLDN4 | SEQ ID NO: 5 | claudin 4 |
| 216641 s at | 0.00003760 | LAD1 | SEQ ID NO: 78 | ladinin 1 |
| 231929_at | 0.00003910 | | SEQ ID NO: 159 | MRNA; cDNA DKFZp586O0724 (from clone DKFZp586O0724) |
| 238778_at | 0.00004080 | MPP7 | SEQ ID NO: 178 | membrane protein, palmitoylated 7 (MAGUK p55 subfamily member 7) |
| 203287 at | 0.00004920 | LAD1 | SEQ ID NO: 24 | ladinin 1 |
| 209114 at | 0.00005560 | TSPAN-1 | SEQ ID NO: 57 | tetraspan 1 |
| 230076 at | 0.00005660 | | SEQ ID NO: 155 | |
| 218677 at | 0.00005710 | S100A14 | SEQ ID NO: 85 | S100 calcium binding protein A14 |
| 236616 at | 0.00005810 | | SEQ ID NO: 172 | CDNA FLJ41623 fis, clone CTONG3009227 |
| 205014 at | 0.00006280 | FGFBP1 | SEQ ID NO: 40 | fibroblast growth factor binding protein 1 |
| 90265 at | 0.00007110 | CENTA1 | SEQ ID NO: 193 | centaurin, alpha 1 |
| 226403 at | 0.00007930 | TMC4 | SEQ ID NO: 136 | transmembrane channel-like 4 |
| 232056 at | 0.00008450 | SCEL | SEQ ID NO: 160 | Scieliin |
| 207655 s at | 0.00008700 | BLNK | SEQ ID NO: 51 | B-cell linker |
| 204160_s_at | 0.00009570 | ENPP4 | SEQ ID NO: 36 | Ectonucleotide pyrophosphatase/phosphodiesterase 4 (putative function) |
| 202454_s_at | 0.00009860 | ERBB3 | SEQ ID NO: 15 | v-erb-b2 erythroblastic leukemia viral oncogene homolog 3 (avian) |
| 232151_at | 0.00010020 | | SEQ ID NO: 162 | MRNA full length insert cDNA clone EUROIMAGE 2344436 |
| 205073_at | 0.00010350 | CYP2J2 | SEQ ID NO: 41 | cytochrome P450, family 2, subfamily J, polypeptide 2 |
| 225658 at | 0.00011660 | LOC339745 | SEQ ID NO: 127 | hypothetical protein LOC339745 |
| 219150 s at | 0.00012240 | CENTA1 | SEQ ID NO: 90 | centaurin, alpha 1 |
| 222857_s_at | 0.00012430 | KCNMB4 | SEQ ID NO: 113 | potassium large conductance calcium-activated channel, subfamily M, beta |
| | | | | member 4 |
| 55662 at | 0.00013490 | C10orf76 | SEQ ID NO: 191 | chromosome 10 open reading frame 76 |
| 204161_s_at | 0.00013900 | ENPP4 | SEQ ID NO: 37 | Ectonucleotide pyrophosphatase/phosphodiesterase 4 (putative function) |
| 205455_at | 0.00014640 | MST1R | SEQ ID NO: 42 | macrophage stimulating 1 receptor (c-met-related tyrosine kinase) |
| 235247 at | 0.00019200 | | SEQ ID NO: 167 | |
| 205617 at | 0.00019960 | PRRG2 | SEQ ID NO: 44 | proline rich Gla (G-carboxyglutamic acid) 2 |
| 225822 at | 0.00020110 | MGC17299 | SEQ ID NO: 129 | hypothetical protein MGC17299 |
| 218779 x at | 0.00021870 | EPS8L1 | SEQ ID NO: 86 | EPS8-like 1 |
| 218792 s at | 0.00023140 | BSPRY | SEQ ID NO: 87 | B-box and SPRY domain containing |
| 203236_s_at | 0.00025890 | LGALS9 | SEQ ID NO: 22 | 11 lectin, galactoside-binding, soluble, 9 (galectin 9) |
| 229223 at | 0.00026990 | | SEQ ID NO: 152 | |
| 226187_at | 0.00027300 | CDS1 | SEQ ID NO: 132 | CDP-diacylglycerol synthase (phosphatidate cytidylyltransferase) 1 |
| 239671 at | 0.00028050 | | SEQ ID NO: 181 | CDNA FLJ31085 fis, clone IMR321000037 |
| 222746 s at | 0.00028540 | BSPRY | SEQ ID NO: 111 | B-box and SPRY domain containing |
| 219858 s at | 0.00029160 | FLJ20160 | SEQ ID NO: 96 | FLJ20160 protein |
| 210749 x at | 0.00029280 | DDR1 | SEQ ID NO: 59 | discoidin domain receptor family, member 1 |
| 211778 s at | 0.00029620 | ZNF339 | SEQ ID NO: 61 | zinc finger protein 339 /// zinc finger protein 339 |
| 230323 s at | 0.00033140 | LOC120224 | SEQ ID NO: 157 | hypothetical protein BC016153 |
| 221665 s at | 0.00033480 | EPS8L1 | SEQ ID NO: 105 | EPS8-like 1 |
| 1007 s at | 0.00033840 | DDR1 | SEQ ID NO: 1 | discoidin domain receptor family, member 1 |
| 218960 at | 0.00034100 | TMPRSS4 | SEQ ID NO: 89 | transmembrane protease, serine 4 |
| 226213 at | 0.00036180 | ERBB3 | SEQ ID NO: 133 | v-erb-b2 erythroblastic leukemia viral oncogene homolog 3 (avian) |
| 202597 at | 0.00037880 | IRF6 | SEQ ID NO: 18 | interferon regulatory factor 6 |
| 228865 at | 0.00037970 | SARG | SEQ ID NO: 149 | specifically androgen-regulated protein |
| 205709_s_at | 0.00038120 | CDS1 | SEQ ID NO: 45 | CDP-diacylglycerol synthase (phosphatidate cytidylyltransferase) 1 |
| 224946 s at | 0.00039420 | MGC12981 | SEQ ID NO: 123 | hypothetical protein MGC12981 |
| 204856_at | 0.00039710 | B3GNT3 | SEQ ID NO: 39 | UDP-GlcNAc:betaGal beta-1,3-N-acetylglucosaminyltransferase 3 |
| 203317 at | 0.00039900 | PSD4 | SEQ ID NO: 25 | pleckstrin and Sec7 domain containing 4 |
| 221958 s at | 0.00040170 | FLJ23091 | SEQ ID NO: 106 | putative NFkB activating protein 373 |
| 201130 s at | 0.00040570 | CDH1 | SEQ ID NO: 3 | cadherin 1, type 1, E-cadherin (epithelial) |
| 205847 at | 0.00042390 | PRSS22 | SEQ ID NO: 47 | protease, serine, 22 |
| 226535 at | 0.00044520 | ITGB6 | SEQ ID NO: 137 | integrin, beta 6 |
| 65517 at | 0.00045130 | AP1M2 | SEQ ID NO: 192 | adaptor-related protein complex 1, mu 2 subunit |
| 91826 at | 0.00045430 | EPS8L1 | SEQ ID NO: 194 | EPS8-like 1 |
| 238673 at | 0.00045640 | | SEQ ID NO: 176 | |
| 221610 s at | 0.00046860 | STAP2 | SEQ ID NO: 104 | signal-transducing adaptor protein-2 |
| 203779 s at | 0.00047400 | EVA1 | SEQ ID NO: 33 | epithelial V-like antigen 1 |
| 222830 at | 0.00047770 | TFCP2L2 | SEQ ID NO. H2 | transcription factor CP2-like 2 |
| 203780 at | 0.00047790 | EVA1 | SEQ ID NO: 34 | epithelial V-like antigen 1 |
| 223233 s at | 0.00048700 | CGN | SEQ ID NO: 117 | cingulin |
| 219412 at | 0.00049410 | RAB38 | SEQ ID NO: 92 | RAB38, member RAS oncogene family |
| 219936 s at | 0.00049770 | GPR87 | SEQ ID NO: 97 | G protein-coupled receptor 87 |
| 226226 at | 0.00049820 | LOC120224 | SEQ ID NO: 134 | hypothetical protein BC016153 |
| 225911 at | 0.00050990 | LOC255743 | SEQ ID NO: 130 | hypothetical protein LOC255743 |
| 226584 s at | 0.00053900 | C20orf55 | SEQ ID NO: 138 | chromosome 20 open reading frame 55 |
| 208779 x at | 0.00054830 | DDR1 | SEQ ID NO: 55 | discoidin domain receptor family, member 1 |
| 208084 at | 0.00055660 | ITGB6 | SEQ ID NO: 52 | integrin, beta 6 |
| 226678 at | 0.00058120 | UNC13D | SEQ ID NO: 139 | unc-13 homolog D (C. elegans) |
| 216949_s_at | 0.00058240 | PKD1 | SEQ ID NO: 80 | polycystic kidney disease 1 (autosomal dominant) |
| 212338 at | 0.00058710 | MYO1D | SEQ ID NO: 67 | myosin ID |
| 241455 at | 0.00059440 | | SEQ ID NO: 183 | |
| 206043 s at | 0.00063910 | KIAA0703 | SEQ ID NO: 48 | KIAA0703 gene product |
| 226706 at | 0.00063930 | FLJ23867 | SEQ ID NO: 140 | hypothetical protein FLJ23867 |
| 210255 at | 0.00064190 | RAD51L1 | SEQ ID NO: 58 | RAD51-like 1 (S. cerevisiae) |
| 203407 at | 0.00068500 | PPL | SEQ ID NO: 29 | periplakin |
| 222859_s_at | 0.00072460 | DAPP1 | SEQ ID NO: 114 | dual adaptor of phosphotyrosine and 3-phosphoinositides |
| 219856 at | 0.00075780 | SARG | SEQ ID NO: 95 | specifically androgen-regulated protein |
| 38766 at | 0.00075940 | SRCAP | SEQ ID NO: 189 | Snf2-related CBP activator protein |
| 239196 at | 0.00076210 | ANKRD22 | SEQ ID NO: 180 | ankyrin repeat domain 22 |
| 32069 at | 0.00077000 | N4BP1 | SEQ ID NO: 187 | Nedd4 binding protein 1 |
| 205780 at | 0.00083050 | | SEQ ID NO: 46 | |
| 238513_at | 0.00083510 | TMG4 | SEQ ID NO: 175 | transmembrane gamma-carboxyglutamic acid protein 4 |
| 229030 at | 0.00084650 | | SEQ ID NO: 151 | |
| 226400 at | 0.00088590 | | SEQ ID NO: 135 | |
| 228441 s at | 0.00093570 | | SEQ ID NO: 147 | |
| 243302 at | 0.00096750 | | SEQ ID NO: 186 | |

Resistant

| | | | | |
|---|---|---|---|---|
| 219525 at | 0.00000020 | FLJ10847 | SEQ ID NO: 93 | hypothetical protein FLJ10847 |
| 212813 at | 0.00000060 | JAM3 | SEQ ID NO: 71 | junctional adhesion molecule 3 |
| 224913 s at | 0.00001960 | TIMM50 | SEQ ID NO: 122 | translocase of inner mitochondrial membrane 50 homolog (yeast) |
| 212764_at | 0.00003930 | TCF8 | SEQ ID NO: 70 | transcription factor 8 (represses interleukin 2 expression) |
| 202641 at | 0.00004360 | ARL3 | SEQ ID NO: 19 | ADP-ribosylation factor-like 3 |
| 212233 at | 0.00004550 | MAP1B | SEQ ID NO: 66 | microtubule-associated protein 1B |
| 224232 s at | 0.00004560 | PX19 | SEQ ID NO: 120 | px19-like protein |
| 226905 at | 0.00004590 | MGC45871 | SEQ ID NO: 142 | hypothetical protein MGC45871 |
| 218553_s_at | 0.00004620 | KCTD15 | SEQ ID NO: 84 | potassium channel tetramerisation domain containing 15 |
| 215218 s at | 0.00004830 | C19orf14 | SEQ ID NO: 77 | chromosome 19 open reading frame 14 |
| 200720_s_at | 0.00006360 | ACTR1A | SEQ ID NO: 2 | ARP1 actin-related protein 1 homolog A, centractin alpha (yeast) |
| 224326 s at | 0.00006750 | RNF134 | SEQ ID NO: 121 | ring finger protein 134 /// ring finger protein 134 |
| 242138 at | 0.00006800 | DLX1 | SEQ ID NO: 184 | distal-less homeo box 1 |
| 222360 at | 0.00007190 | CGI-30 | SEQ ID NO: 108 | CGI-30 protein |
| 208393 s at | 0.00007530 | RAD50 | SEQ ID NO: 53 | RAD50 homolog (S. cerevisiae) |
| 228683 s at | 0.00009450 | KCTD15 | SEQ ID NO: 148 | potassium channel tetramerisation domain containing 15 |
| 228882 at | 0.00012370 | TUB | SEQ ID NO: 150 | tubby homolog (mouse) |
| 55662 at | 0.00013490 | C10orf76 | SEQ ID NO: 191 | chromosome 10 open reading frame 76 |
| 221432_s_at | 0.00014780 | SLC25A28 | SEQ ID NO: 102 | solute carrier family 25, member 28 /// solute carrier family 25, member 28 |
| 203082 at | 0.00015630 | BMS1L | SEQ ID NO: 20 | BMS1-like, ribosome assembly protein (yeast) |
| 223192 at | 0.00015890 | SLC25A28 | SEQ ID NO: 116 | solute carrier family 25, member 28 |
| 226084 at | 0.00017240 | MAP1B | SEQ ID NO: 131 | microtubule-associated protein 1B |
| 229587 at | 0.00017530 | UBA2 | SEQ ID NO. 153 | SUMO-1 activating enzyme subunit 2 |
| 211071_s_at | 0.00018080 | AF1Q | SEQ ID NO: 60 | ALL1-fused gene from chromosome 1q /// ALL1-fused gene from chromosome 1q |
| 214448_x_at | 0.00018290 | NFKBIB | SEQ ID NO: 74 | nuclear factor of kappa light polypeptide gene enhancer in B-cells inhibitor, beta |
| 225413 at | 0.00018660 | USMG5 | SEQ ID NO: 125 | upregulated during skeletal muscle growth 5 |
| 235036 at | 0.00018930 | MGC46719 | SEQ ID NO: 165 | hypothetical protein MGC46719 |
| 203441 s at | 0.00019180 | CDH2 | SEQ ID NO: 31 | cadherin 2, type 1, N-cadherin (neuronal) |
| 225096 at | 0.00019610 | HSA272196 | SEQ ID NO: 124 | hypothetical protein, clone 2746033 |
| 239077 at | 0.00020310 | GALNACT-2 | SEQ ID NO: 179 | chondroitin sulfate GalNAcT-2 |
| 50314 i at | 0.00022630 | C20orf27 | SEQ ID NO: 190 | chromosome 20 open reading frame 27 |
| 222664_at | 0.00024210 | KCTD15 | SEQ ID NO: 109 | potassium channel tetramerisation domain containing 15 |
| 201869 s at | 0.00024250 | TBL1X | SEQ ID NO: 9 | transducin (beta)-like 1X-linked |
| 219855_at | 0.00024820 | NUDT11 | SEQ ID NO: 94 | nudix (nucleoside diphosphate linked moiety X)-type motif |
| 202167 s at | 0.00026530 | MMS19L | SEQ ID NO: 10 | MMS19-like (MET18 homolog, S. cerevisiae) |
| 201157 s at | 0.00027160 | NMT1 | SEQ ID NO: 4 | N-myristoyltransferase 1 |
| 226876 at | 0.00030570 | MGC45871 | SEQ ID NO: 141 | hypothetical protein MGC45871 |
| 218891 at | 0.00034090 | C10orf76 | SEQ ID NO: 88 | chromosome 10 open reading frame 76 |
| 222668_at | 0.00034910 | KCTD15 | SEQ ID NO: 110 | potassium channel tetramerisation domain containing 15 |
| 217496 s at | 0.00036040 | IDE | SEQ ID NO: 81 | insulin-degrading enzyme |
| 235202 x at | 0.00036460 | [KIP | SEQ ID NO: 166 | IKK interacting protein |
| 212736 at | 0.00036600 | BC008967 | SEQ ID NO: 69 | hypothetical gene BC008967 |
| 203327 at | 0.00036980 | IDE | SEQ ID NO: 26 | insulin-degrading enzyme |
| 205458_at | 0.00042200 | MC1R | SEQ ID NO: 43 | melanocortin 1 receptor (alpha melanocyte stimulating hormone receptor) |
| 202340_x_at | 0.00043030 | NR4A1 | SEQ ID NO: 14 | nuclear receptor subfamily 4, group A, member 1 |
| 215146 s at | 0.00043080 | KIAA1043 | SEQ ID NO: 76 | KIAA1043 protein |
| 223032 x at | 0.00043320 | PX19 | SEQ ID NO: 115 | px19-like protein |
| 230312 at | 0.00047560 | | SEQ ID NO: 156 | |
| 211855_s_at | 0.00047620 | SLC25A14 | SEQ ID NO: 62 | solute carrier family 25 (mitochondrial carrier, brain), member 14 |
| 222280 at | 0.00050070 | | SEQ ID NO: 107 | CDNA clone IMAGE: 6602785, partial cds |
| 223295 s at | 0.00053580 | LUC7L | SEQ ID NO: 118 | LUC7-like (S. cerevisiae) |
| 212120 at | 0.00053760 | RHOQ | SEQ ID NO: 65 | ras homolog gene family, member Q |
| 202328_s_at | 0.00054270 | PKD1 | SEQ ID NO: 13 | polycystic kidney disease 1 (autosomal dominant) |
| 203783 x at | 0.00055660 | POLRMT | SEQ ID NO: 35 | polymerase (RNA) mitochondria! (DNA directed) |
| 213262 at | 0.00056350 | SACS | SEQ ID NO: 72 | spastic ataxia of Charlevoix-Saguenay (sacsin) |
| 225793 at | 0.00058010 | MGC46719 | SEQ ID NO: 128 | hypothetical protein MGC46719 |
| 216949_s_at | 0.00058240 | PKD1 | SEQ ID NO: 80 | polycystic kidney disease 1 (autosomal dominant) |
| 214577 at | 0.00062040 | MAP1B | SEQ ID NO: 75 | microtubule-associated protein 1B |
| 220178 at | 0.00062110 | C19orf128 | SEQ ID NO: 99 | chromosome 19 open reading frame 28 |
| 201868 s at | 0.00062220 | TBL1X | SEQ ID NO: 8 | transducin (beta)-like 1X-linked |
| 201679 at | 0.00063150 | ARS2 | SEQ ID NO: 6 | arsenate resistance protein ARS2 |
| 208968 s at | 0.00066500 | CIAPIN1 | SEQ ID NO: 56 | cytokine induced apoptosis inhibitor 1 |
| 207627 s at | 0.00068160 | TFCP2 | SEQ ID NO: 50 | transcription factor CP2 |
| 217791 s at | 0.00069580 | ALDH18A1 | SEQ ID NO: 82 | aldehyde dehydrogenase 18 family, member A1 |
| 225582 at | 0.00069740 | KIAA1754 | SEQ ID NO: 126 | KIAA1754 |
| 231721 at | 0.00070410 | JAM3 | SEQ ID NO: 158 | junctional adhesion molecule 3 |
| 208595 s at | 0.00074160 | MBD1 | SEQ ID NO: 54 | methyl-CpG binding domain protein 1 |
| 212015 X at | 0.00075720 | PTBP1 | SEQ ID NO: 63 | polypyrimidine tract binding protein 1 |
| P204744 s at | 0.00076150 | IARS | SEQ ID NO: 38 | isoleucine-tRNA synthetase |
| 203718 at | 0.00076760 | NTE | SEQ ID NO: 32 | neuropathy target esterase |
| 232149_s_at | 0.00076810 | NSMAF | SEQ ID NO: 161 | neutral sphingomyelinase (N-SMase) activation associated factor |
| 202264_s_at | 0.00076920 | TOMM40 | SEQ ID NO: 11 | translocase of outer mitochondrial membrane 40 homolog (yeast) |
| 32069 at | 0.00077000 | N4BP1 | SEQ ID NO: 187 | Nedd4 binding protein 1 |
| 216862 s at | 0.00078160 | MTCP1 | SEQ ID NO: 79 | mature T-cell proliferation 1 |
| 220370 s at | 0.00079540 | USP36 | SEQ ID NO: 101 | ubiquitin specific protease 36 |
| 242191 at | 0.00080180 | | SEQ ID NO: 185 | LOC400781 |
| 203109_at | 0.00081840 | UBE2M | SEQ ID NO: 21 | ubiquitin-conjugating enzyme E2M (UBC12 homolog, yeast) |
| 203440 at | 0.00\083250 | CDH2 | SEQ ID NO: 30 | cadherin 2, type 1, N-cadherin (neuronal) |
| 221550_at | 0.00083680 | COX15 | SEQ ID NO: 103 | COX15 homolog, cytochrome c oxidase assembly protein (yeast) |
| 37966 at | 0.00090730 | PARVB | SEQ ID NO: 188 | parvin, beta |
| 212424 at | 0.00092430 | PDCD11 | SEQ ID NO: 68 | programmed cell death 11 |
| 228441 s at | 0.00093570 | | SEQ ID NO: 147 | |
| 203328 x at | 0.00095810 | IDE | SEQ ID NO: 27 | insulin-degrading enzyme |
| 201680 x at | 0.00095980 | ARS2 | SEQ ID NO: 7 | arsenate resistance protein ARS2 |
| 219969 at | 0.00097320 | CXorf15 | SEQ ID NO: 98 | chromosome X open reading frame 15 |

### Example 1A

[0122] The following example describes the identification of a biomarker panel that discriminates gefitinib-sensitive cell lines from gefitinib-resistant cell lines.

[0123] Methods: Gefitinib sensitivity was determined in 18 NSCLC cell lines using MTT assays. Cell lines were classified as gefitinib sensitive (IC₅₀<1 μM), resistant (IC₅₀>10 μM) or intermediate sensitivity (10 μM<IC₅₀>1). Oligonucleotide gene arrays (Affymetrix® Human Genome U133 set, 39,000 genes) were done on 10 cell lines. Three distinct filtration and normalization algorithms to process the expression data were used, and a list of genes were generated that were both statistically significant (unadjusted p=0.001 cutoff) and corrected for false positive occurrence. This approach was used in combination with 5 distinct machine learning algorithms used to build a test set for predictor genes that were successful for 100% of the test cases. The best discriminators (>3 fold difference in expression between sensitive and resistant cell lines) were selected for Real-time RT-PCR.

[0124] Results: A list of genes was generated initially from the Affymetrix array analysis. By using the mathematical algorithm, 14 different candidate genes were selected for RT-PCR. Twelve of the 14 genes were verified to discriminate between sensitive and resistant cell lines by Real-time RT-PCR.

[0125] Conclusion: Based on NSCLC cell line studies it was possible to identify genes which strongly discriminated gefitinib (Iressa) sensitive cell lines from the resistant ones. The genes are ranked in Table 1A. This entire biomarker panel is of significant value for selecting NSCLC patients for gefitinib treatment.

TABLE 1A

| | | mean | mean | | | |
|---|---|---|---|---|---|---|
| | parametric | intensity | intensity | Gene | Sequence | |
| Probe set | p-value | (resistant) | (sensitive) | symbol | Identifier | Description |
| 202286 s at | 0.00000005 | 3.8 | 9893.5 | TACSTD2 | SEQ ID NO: 12 | tumor-associated calcium signal transducer 2 |
| 202489_s_at | 0.00000005 | 25.8 | 2372.6 | FXYD3 | SEQ ID NO: 16 | FXYD domain containing ion transport |
| | | | | | | regulator 3 |
| 213285 at | 0.00000005 | 8.0 | 1739.3 | TMEM30B | SEQ ID NO: 73 | transmembrane protein 30B |
| 218186 at | 0.00000005 | 3.6 | 2295.0 | RAB25 | SEQ ID NO: 83 | RAB25, member RAS oncogene family |
| 235515 at | 0.00000005 | 6.4 | 287.6 | FLJ36445 | SEQ ID NO: 168 | hypothetical protein FLJ36445 |
| 235988 at | 0.00000005 | 11.3 | 345.7 | GPR110 | SEQ ID NO: 170 | G protein-coupled receptor 110 |
| 238689 at | 0.00000005 | 5.4 | 2210.5 | GPR110 | SEQ ID NO: 177 | G protein-coupled receptor 110 |
| 232165 at | 0.00000010 | 4.6 | 244.0 | EPPK1 | SEQ ID NO: 164 | epiplakin 1 |
| 240633 at | 0.00000010 | 6.2 | 61.2 | FLJ33718 | SEQ ID NO: 182 | hypothetical protein FLJ33718 |
| 219525 at | 0.00000020 | 179.3 | 6.1 | FLJ10847 | SEQ ID NO: 93 | hypothetical protein FLJ10847 |
| 229599_at | 0.00000020 | 5.9 | 112.8 | | SEQ ID NO: 154 | Clone IMAGE: 5166045, Mrna |
| 203397_s_at | 0.00000030 | 10.1 | 1128.6 | GALNT3 | SEQ ID NO: 28 | UDP-N-acetyl-alpha-D- |
| | | | | | | galactosamine:polypeptide N- |
| | | | | | | acetylgalactosaminyltransferase 3 (GalNAc- |
| | | | | | | T3) |
| 232164 s at | 0.00000030 | 5.8 | 411.1 | EPPK1 | SEQ ID NO: 163 | epiplakin 1 |
| 212813 at | 0.00000060 | 163.8 | 7.9 | JAM3 | SEQ ID NO: 71 | junctional adhesion molecule 3 |
| 227134 at | 0.00000160 | 14.2 | 705.7 | SYTL1 | SEQ ID NO: 143 | synaptotagmin-like 1 |
| 236489 at | 0.00000170 | 8.2 | 498.5 | | SEQ ID NO: 171 | |
| 235651 at | 0.00000480 | 3.9 | 98.2 | | SEQ ID NO: 169 | |
| 238439 at | 0.00000700 | 7.7 | 537.6 | ANKRD22 | SEQ ID NO: 173 | ankyrin repeat domain 22 |
| 219388 at | 0.00000730 | 19.3 | 342.1 | TFCP2L3 | SEQ ID NO: 91 | transcription factor CP2-like 3 |
| 227985 at | 0.00000820 | 5.0 | 179.9 | | SEQ ID NO: 146 | |
| 227450 at | 0.00000890 | 5.1 | 509.7 | FLJ32115 | SEQ ID NO: 144 | hypothetical protein FLJ32115 |
| 203256 at | 0.00000980 | 13.4 | 2223.0 | CDH3 | SEQ ID NO: 23 | cadherin 3, type 1, P-cadherin (placental) |
| 220318 at | 0.00000980 | 4.4 | 44.7 | EPN3 | SEQ ID NO: 100 | epsin 3 |
| 202525 at | 0.00001030 | 7.8 | 1194.6 | PRSS8 | SEQ ID NO: 17 | protease, serine, 8 (prostasin) |
| 227803_at | 0.00001080 | 7.8 | 206.1 | ENPP5 | SEQ ID NO: 145 | ectonudeotide |
| | | | | | | pyrophosphatase/phosphodiesterase 5 |
| | | | | | | (putative function) |
| 206884 s at | 0.00001200 | 12.8 | 822.7 | SCEL | SEQ ID NO: 49 | Sciellin |
| 223895 s at | 0.00001290 | 13.8 | 183.6 | EPN3 | SEQ ID NO: 119 | epsin 3 |
| 238493 at | 0.00001650 | 7.3 | 18.5 | ZNF506 | SEQ ID NO: 174 | zinc finger protein 506 |
| 224913 s at | 0.00001960 | 2703.8 | 1081.5 | TIMM50 | SEQ ID NO: 122 | translocase of inner mitochondrial membrane |
| | | | | | | 50 homolog (yeast) |
| 201428 at | 0.00002330 | 90.3 | 3416.4 | CLDN4 | SEQ ID NO: 5 | claudin 4 |
| 216641 s at | 0.00003760 | 26.8 | 423.5 | LAD1 | SEQ ID NO: 78 | ladinin 1 |
| 231929_at | 0.00003910 | 31.0 | 340.7 | | SEQ ID NO: 159 | MRNA; cDNA DKFZp586O0724 (from |
| | | | | | | clone DKFZp586O0724) |
| 212764_at | 0.00003930 | 320.0 | 9.2 | TCF8 | SEQ ID NO: 70 | transcription factor 8 (represses interleukin 2 |
| | | | | | | expression) |
| 238778_at | 0.00004080 | 15.0 | 106.1 | MPP7 | SEQ ID NO: 178 | membrane protein, palmitoylated 7 (MAGUK |
| | | | | | | p55 subfamily member 7) |
| 202641 at | 0.00004360 | 2011.3 | 933.3 | ARL3 | SEQ ID NO: 19 | ADP-ribosylation factor-like 3 |
| 212233 at | 0.00004550 | 2005.7 | 137.0 | MAP1B | SEQ ID NO: 66 | microtubule-associated protein 1B |
| 224232 s at | 0.00004560 | 1054.1 | 438.3 | PX19 | SEQ ID NO: 120 | px19-like protein |
| 226905 at | 0.00004590 | 240.2 | 14.0 | MGC45871 | SEQ ID NO: 142 | hypothetical protein MGC45871 |
| 218553_s_at | 0.00004620 | 177.0 | 38.2 | KCTD15 | SEQ ID NO: 84 | potassium channel tetramerisation domain |
| | | | | | | containing 15 |
| 215218 s at | 0.00004830 | 368.6 | 142.8 | C19orf14 | SEQ ID NO: 77 | chromosome 19 open reading frame 14 |
| 203287 at | 0.00004920 | 23.4 | 505.0 | LAD1 | SEQ ID NO: 24 | ladinin 1 |
| 209114 at | 0.00005560 | 43.7 | 717.2 | TSPAN-1 | SEQ ID NO: 57 | tetraspan 1 |
| 230076 at | 0.00005660 | 21.2 | 120.1 | | SEQ ID NO: 155 | |
| 218677 at | 0.00005710 | 21.5 | 966.3 | S100A14 | SEQ ID NO: 85 | S100 calcium binding protein A14 |
| 236616 at | 0.00005810 | 17.8 | 32.9 | | SEQ ID NO: 172 | CDNA FLJ41623 fis, clone CTONG3009227 |
| 205014 at | 0.00006280 | 13.4 | 491.2 | FGFBP1 | SEQ ID NO: 40 | fibroblast growth factor binding protein 1 |
| 200720_s_at | 0.00006360 | 1089.8 | 391.9 | ACTR1A | SEQ ID NO: 2 | ARP1 actin-related protein 1 homolog A, |
| | | | | | | centractin alpha (yeast) |
| 224326 s at | 0.00006750 | 499.6 | 135.5 | RNF134 | SEQ ID NO: 121 | ring finger protein 134 /// ring finger protein |
| | | | | | | 134 |
| 242138 at | 0.00006800 | 207.4 | 6.9 | DLX1 | SEQ ID NO: 184 | distal-less homeo box 1 |
| 90265 at | 0.00007110 | 145.0 | 1117.7 | CENTA1 | SEQ ID NO: 193 | centaurin, alpha 1 |
| 222360 at | 0.00007190 | 97.8 | 21.2 | CGI-30 | SEQ ID NO: 108 | CGI-30 protein |
| 208393 s at | 0.00007530 | 1370.0 | 596.5 | RAD50 | SEQ ID NO: 53 | RAD50 homolog (S. cerevisiae) |
| 226403 at | 0.00007930 | 22.5 | 680.1 | TMC4 | SEQ ID NO: 136 | transmembrane channel-like 4 |
| 232056 at | 0.00008450 | 9.8 | 141.7 | SCEL | SEQ ID NO: 160 | Scieliin |
| 207655 s at | 0.00008700 | 7.1 | 71.1 | BLNK | SEQ ID NO: 51 | B-cell linker |
| 228683 s at | 0.00009450 | 101.5 | 18.5 | KCTD15 | SEQ ID NO: 148 | potassium channel tetramerisation domain |
| | | | | | | containing 15 |
| 204160_s_at | 0.00009570 | 23.9 | 314.8 | ENPP4 | SEQ ID NO: 36 | Ectonucleotide |
| | | | | | | pyrophosphatase/phosphodiesterase 4 |
| | | | | | | (putative function) |
| 202454_s_at | 0.00009860 | 16.3 | 1266.2 | ERBB3 | SEQ ID NO: 15 | v-erb-b2 erythroblastic leukemia viral |
| | | | | | | oncogene homolog 3 (avian) |
| 232151_at | 0.00010020 | 8.5 | 295.7 | | SEQ ID NO: 162 | MRNA full length insert cDNA clone |
| | | | | | | EUROIMAGE 2344436 |
| 205073_at | 0.00010350 | 30.8 | 136.8 | CYP2J2 | SEQ ID NO: 41 | cytochrome P450, family 2, subfamily J, |
| | | | | | | polypeptide 2 |
| 225658 at | 0.00011660 | 167.1 | 516.3 | LOC339745 | SEQ ID NO: 127 | hypothetical protein LOC339745 |
| 219150 s at | 0.00012240 | 30.9 | 200.1 | CENTA1 | SEQ ID NO: 90 | centaurin, alpha 1 |
| 228882 at | 0.00012370 | 152.7 | 10.4 | TUB | SEQ ID NO: 150 | tubby homolog (mouse) |
| 222857_s_at | 0.00012430 | 17.2 | 344.7 | KCNMB4 | SEQ ID NO: 113 | potassium large conductance calcium- |
| | | | | | | activated channel, subfamily M, beta member 4 |
| 55662 at | 0.00013490 | 84.7 | 31.7 | C10orf76 | SEQ ID NO: 191 | chromosome 10 open reading frame 76 |
| 204161_s_at | 0.00013900 | 12.5 | 69.3 | ENPP4 | SEQ ID NO: 37 | Ectonucleotide |
| | | | | | | pyrophosphatase/phosphodiesterase 4 |
| | | | | | | (putative function) |
| 205455_at | 0.00014640 | 20.1 | 333.2 | MST1R | SEQ ID NO: 42 | macrophage stimulating 1 receptor (c-met- |
| | | | | | | related tyrosine kinase) |
| 221432_s_at | 0.00014780 | 108.4 | 34.4 | SLC25A28 | SEQ ID NO: 102 | solute carrier family 25, member 28 /// solute |
| | | | | | | carrier family 25, member 28 |
| 203082 at | 0.00015630 | 1316.0 | 435.4 | BMS1L | SEQ ID NO: 20 | BMS1-like, ribosome assembly protein |
| | | | | | | (yeast) |
| 223192 at | 0.00015890 | 391.2 | 207.2 | SLC25A28 | SEQ ID NO: 116 | solute carrier family 25, member 28 |
| 226084 at | 0.00017240 | 1660.7 | 87.5 | MAP1B | SEQ ID NO: 131 | microtubule-associated protein 1B |
| 229587 at | 0.00017530 | 247.0 | 86.2 | UBA2 | SEQ ID NO: 153 | SUMO-1 activating enzyme subunit 2 |
| 211071_s_at | 0.00018080 | 2398.5 | 76.5 | AF1Q | SEQ ID NO: 60 | ALL1-fused gene from chromosome 1q /// |
| | | | | | | ALL1-fused gene from chromosome 1q |
| 214448_x_at | 0.00018290 | 310.0 | 123.8 | NFKBIB | SEQ ID NO: 74 | nuclear factor of kappa light polypeptide gene |
| | | | | | | enhancer in B-cells inhibitor, beta |
| 225413 at | 0.00018660 | 8130.9 | 4324.6 | USMG5 | SEQ ID NO: 125 | upregulated during skeletal muscle growth 5 |
| 235036 at | 0.00018930 | 262.2 | 19.4 | MGC46719 | SEQ ID NO: 165 | hypothetical protein MGC46719 |
| 203441 s at | 0.00019180 | 684.0 | 72.1 | CDH2 | SEQ ID NO: 31 | cadherin 2, type 1, N-cadherin (neuronal) |
| 235247 at | 0.00019200 | 6.2 | 262.8 | | SEQ ID NO: 167 | |
| 225096 at | 0.00019610 | 1755.7 | 703.7 | HSA272196 | SEQ ID NO: 124 | hypothetical protein, clone 2746033 |
| 205617 at | 0.00019960 | 9.2 | 23.1 | PRRG2 | SEQ ID NO: 44 | proline rich Gla (G-carboxyglutamic acid) 2 |
| 225822 at | 0.00020110 | 10.3 | 468.3 | MGC17299 | SEQ ID NO: 129 | hypothetical protein MGC17299 |
| 239077 at | 0.00020310 | 146.8 | 49.3 | GALNACT-2 | SEQ ID NO: 179 | chondroitin sulfate GalNAcT-2 |
| 218779 x at | 0.00021870 | 72.0 | 404.0 | EPS8L1 | SEQ ID NO: 86 | EPS8-like 1 |
| 50314 i at | 0.00022630 | 830.5 | 279.4 | C20orf27 | SEQ ID NO: 190 | chromosome 20 open reading frame 27 |
| 218792 s at | 0.00023140 | 74.9 | 468.6 | BSPRY | SEQ ID NO: 87 | B-box and SPRY domain containing |
| 222664_at | 0.00024210 | 624.9 | 42.5 | KCTD15 | SEQ ID NO: 109 | potassium channel tetramerisation domain |
| | | | | | | containing 15 |
| 201869 s at | 0.00024250 | 290.8 | 70.5 | TBL1X | SEQ ID NO: 9 | transducin (beta)-like 1X-linked |
| 219855_at | 0.00024820 | 233.0 | 27.6 | NUDT11 | SEQ ID NO: 94 | nudix (nucleoside diphosphate linked moiety |
| | | | | | | X)-type motif |
| 203236_s_at | 0.00025890 | 81.3 | 318.7 | LGALS9 | SEQ ID NO: 22 | 11 lectin, galactoside-binding, soluble, 9 |
| | | | | | | (galectin 9) |
| 202167 s at | 0.00026530 | 770.6 | 340.7 | MMS19L | SEQ ID NO: 10 | MMS19-like (MET18 homolog, S. cerevisiae) |
| 229223 at | 0.00026990 | 21.7 | 130.8 | | SEQ ID NO: 152 | |
| 201157 s at | 0.00027160 | 2272.3 | 1323.6 | NMT1 | SEQ ID NO: 4 | N-myristoyltransferase 1 |
| 226187_at | 0.00027300 | 32.2 | 301.2 | CDS1 | SEQ ID NO: 132 | CDP-diacylglycerol synthase (phosphatidate |
| | | | | | | cytidylyltransferase) 1 |
| 239671 at | 0.00028050 | 12.2 | 43.6 | | SEQ ID NO: 181 | CDNA FLJ31085 fis, clone IMR321000037 |
| 222746 s at | 0.00028540 | 8.7 | 288.5 | BSPRY | SEQ ID NO: 111 | B-box and SPRY domain containing |
| 219858 s at | 0.00029160 | 12.3 | 63.1 | FLJ20160 | SEQ ID NO: 96 | FLJ20160 protein |
| 210749 x at | 0.00029280 | 507.7 | 2452.9 | DDR1 | SEQ ID NO: 59 | discoidin domain receptor family, member 1 |
| 211778 s at | 0.00029620 | 20.3 | 334.6 | ZNF339 | SEQ ID NO: 61 | zinc finger protein 339 /// zinc finger protein |
| | | | | | | 339 |
| 226876 at | 0.00030570 | 283.5 | 45.7 | MGC45871 | SEQ ID NO: 141 | hypothetical protein MGC45871 |
| 230323 s at | 0.00033140 | 17.4 | 295.5 | LOC120224 | SEQ ID NO: 157 | hypothetical protein BC016153 |
| 221665 s at | 0.00033480 | 20.5 | 172.5 | EPS8L1 | SEQ ID NO: 105 | EPS8-like 1 |
| 1007 s at | 0.00033840 | 469.2 | 2729.2 | DDR1 | SEQ ID NO: 1 | discoidin domain receptor family, member 1 |
| 218891 at | 0.00034090 | 218.3 | 108.6 | C10orf76 | SEQ ID NO: 88 | chromosome 10 open reading frame 76 |
| 218960 at | 0.00034100 | 25.7 | 408.5 | TMPRSS4 | SEQ ID NO: 89 | transmembrane protease, serine 4 |
| 222668_at | 0.00034910 | 573.0 | 38.2 | KCTD15 | SEQ ID NO: 110 | potassium channel tetramerisation domain |
| | | | | | | containing 15 |
| 217496 s at | 0.00036040 | 593.8 | 172.2 | IDE | SEQ ID NO: 81 | insulin-degrading enzyme |
| 226213 at | 0.00036180 | 27.4 | 1639.9 | ERBB3 | SEQ ID NO: 133 | v-erb-b2 erythroblastic leukemia viral |
| | | | | | | oncogene homolog 3 (avian) |
| 235202 x at | 0.00036460 | 59.3 | 14.9 | [KIP | SEQ ID NO: 166 | IKK interacting protein |
| 212736 at | 0.00036600 | 290.0 | 27.4 | BC008967 | SEQ ID NO: 69 | hypothetical gene BC008967 |
| 203327 at | 0.00036980 | 410.7 | 105.9 | IDE | SEQ ID NO: 26 | insulin-degrading enzyme |
| 202597 at | 0.00037880 | 5.1 | 129.6 | IRF6 | SEQ ID NO: 18 | interferon regulatory factor 6 |
| 228865 at | 0.00037970 | 9.2 | 322.3 | SARG | SEQ ID NO: 149 | specifically androgen-regulated protein |
| 205709_s_at | 0.00038120 | 13.4 | 254.3 | CDS1 | SEQ ID NO: 45 | CDP-diacylglycerol synthase (phosphatidate |
| | | | | | | cytidylyltransferase) 1 |
| 224946 s at | 0.00039420 | 329.1 | 681.4 | MGC12981 | SEQ ID NO: 123 | hypothetical protein MGC12981 |
| 204856_at | 0.00039710 | 80.7 | 400.7 | B3GNT3 | SEQ ID NO: 39 | UDP-GlcNAc:betaGal beta-1,3-N- |
| | | | | | | acetylglucosaminyltransferase 3 |
| 203317 at | 0.00039900 | 58.0 | 171.0 | PSD4 | SEQ ID NO: 25 | pleckstrin and Sec7 domain containing 4 |
| 221958 s at | 0.00040170 | 171.2 | 468.6 | FLJ23091 | SEQ ID NO: 106 | putative NFkB activating protein 373 |
| 201130 s at | 0.00040570 | 15.3 | 1183.0 | CDH1 | SEQ ID NO: 3 | cadherin 1, type 1, E-cadherin (epithelial) |
| 205458_at | 0.00042200 | 109.4 | 57.6 | MC1R | SEQ ID NO: 43 | melanocortin 1 receptor (alpha melanocyte |
| | | | | | | stimulating hormone receptor) |
| 205847 at | 0.00042390 | 71.8 | 206.0 | PRSS22 | SEQ ID NO: 47 | protease, serine, 22 |
| 202340_x_at | 0.00043030 | 336.4 | 72.7 | NR4A1 | SEQ ID NO: 14 | nuclear receptor subfamily 4, group A, |
| | | | | | | member 1 |
| 215146 s at | 0.00043080 | 165.6 | 48.8 | KIAA1043 | SEQ ID NO: 76 | KIAA1043 protein |
| 223032 x at | 0.00043320 | 5068.6 | 2903.7 | PX19 | SEQ ID NO: 115 | px19-like protein |
| 226535 at | 0.00044520 | 15.3 | 862.3 | ITGB6 | SEQ ID NO: 137 | integrin, beta 6 |
| 65517 at | 0.00045130 | 50.8 | 387.0 | AP1M2 | SEQ ID NO: 192 | adaptor-related protein complex 1, mu 2 |
| | | | | | | subunit |
| 91826 at | 0.00045430 | 59.7 | 373.3 | EPS8L1 | SEQ ID NO: 194 | EPS8-like 1 |
| 238673 at | 0.00045640 | 44.3 | 578.2 | | SEQ ID NO: 176 | |
| 221610 s at | 0.00046860 | 83.5 | 569.8 | STAP2 | SEQ ID NO: 104 | signal-transducing adaptor protein-2 |
| 203779 s at | 0.00047400 | 17.8 | 143.2 | EVA1 | SEQ ID NO: 33 | epithelial V-like antigen 1 |
| 230312 at | 0.00047560 | 91.2 | 11.6 | | SEQ ID NO: 156 | |
| 211855_s_at | 0.00047620 | 355.5 | 97.2 | SLC25A14 | SEQ ID NO: 62 | solute carrier family 25 (mitochondrial |
| | | | | | | carrier, brain), member 14 |
| 222830 at | 0.00047770 | 31.3 | 586.6 | TFCP2L2 | SEQ ID NO. H2 | transcription factor CP2-like 2 |
| 203780 at | 0.00047790 | 33.5 | 647.3 | EVA1 | SEQ ID NO: 34 | epithelial V-like antigen 1 |
| 223233 s at | 0.00048700 | 37.9 | 541.0 | CGN | SEQ ID NO: 117 | cingulin |
| 219412 at | 0.00049410 | 6.2 | 241.9 | RAB38 | SEQ ID NO: 92 | RAB38, member RAS oncogene family |
| 219936 s at | 0.00049770 | 5.8 | 171.1 | GPR87 | SEQ ID NO: 97 | G protein-coupled receptor 87 |
| 226226 at | 0.00049820 | 31.5 | 465.5 | LOC120224 | SEQ ID NO: 134 | hypothetical protein BC016153 |
| 222280 at | 0.00050070 | 312.5 | 152.0 | | SEQ ID NO: 107 | CDNA clone IMAGE: 6602785, partial cds |
| 225911 at | 0.00050990 | 6.9 | 142.2 | LOC255743 | SEQ ID NO: 130 | hypothetical protein LOC255743 |
| 223295 s at | 0.00053580 | 463.2 | 264.9 | LUC7L | SEQ ID NO: 118 | LUC7-like (S. cerevisiae) |
| 212120 at | 0.00053760 | 1118.9 | 381.7 | RHOQ | SEQ ID NO: 65 | ras homolog gene family, member Q |
| 226584 s at | 0.00053900 | 81.8 | 186.8 | C20orf55 | SEQ ID NO: 138 | chromosome 20 open reading frame 55 |
| 202328_s_at | 0.00054270 | 307.4 | 127.3 | PKD1 | SEQ ID NO: 13 | polycystic kidney disease 1 (autosomal |
| | | | | | | dominant) |
| 208779 x at | 0.00054830 | 489.8 | 2385.8 | DDR1 | SEQ ID NO: 55 | discoidin domain receptor family, member 1 |
| 203783 x at | 0.00055660 | 33.6 | 14.8 | POLRMT | SEQ ID NO: 35 | polymerase (RNA) mitochondria! (DNA |
| | | | | | | directed) |
| 208084 at | 0.00055660 | 29.0 | 347.8 | ITGB6 | SEQ ID NO: 52 | integrin, beta 6 |
| 213262 at | 0.00056350 | 597.1 | 48.5 | SACS | SEQ ID NO: 72 | spastic ataxia of Charlevoix-Saguenay |
| | | | | | | (sacsin) |
| 225793 at | 0.00058010 | 1662.4 | 133.4 | MGC46719 | SEQ ID NO: 128 | hypothetical protein MGC46719 |
| 226678 at | 0.00058120 | 63.1 | 171.9 | UNC13D | SEQ ID NO: 139 | unc-13 homolog D (C. elegans) |
| 216949_s_at | 0.00058240 | 83.3 | 27.2 | PKD1 | SEQ ID NO: 80 | polycystic kidney disease 1 (autosomal |
| | | | | | | dominant) |
| 212338 at | 0.00058710 | 28.0 | 335.5 | MYO1D | SEQ ID NO: 67 | myosin ID |
| 241455 at | 0.00059440 | 7.3 | 68.8 | | SEQ ID NO: 183 | |
| 214577 at | 0.00062040 | 279.3 | 58.3 | MAP1B | SEQ ID NO: 75 | microtubule-associated protein 1B |
| 220178 at | 0.00062110 | 193.7 | 48.8 | C19orf28 | SEQ ID NO: 99 | chromosome 19 open reading frame 28 |
| 201868 s at | 0.00062220 | 103.1 | 21.6 | TBL1X | SEQ ID NO: 8 | transducin (beta)-like 1X-linked |
| 201679 at | 0.00063150 | 451.3 | 212.9 | ARS2 | SEQ ID NO: 6 | arsenate resistance protein ARS2 |
| 206043 s at | 0.00063910 | 8.0 | 67.9 | KIAA0703 | SEQ ID NO: 48 | KIAA0703 gene product |
| 226706 at | 0.00063930 | 81.4 | 847.1 | FLJ23867 | SEQ ID NO: 140 | hypothetical protein FLJ23867 |
| 210255 at | 0.00064190 | 8.8 | 36.1 | RAD51L1 | SEQ ID NO: 58 | RAD51-like 1 (S. cerevisiae) |
| 208968 s at | 0.00066500 | 2065.0 | 1181.4 | CIAPIN1 | SEQ ID NO: 56 | cytokine induced apoptosis inhibitor 1 |
| 207627 s at | 0.00068160 | 401.7 | 205.1 | TFCP2 | SEQ ID NO: 50 | transcription factor CP2 |
| 203407 at | 0.00068500 | 39.6 | 1680.0 | PPL | SEQ ID NO: 29 | periplakin |
| 217791 s at | 0.00069580 | 1777.8 | 837.7 | ALDH18A1 | SEQ ID NO: 82 | aldehyde dehydrogenase 18 family, member |
| | | | | | | A1 |
| 225582 at | 0.00069740 | 415.9 | 44.7 | KIAA1754 | SEQ ID NO: 126 | KIAA1754 |
| 231721 at | 0.00070410 | 37.7 | 4.4 | JAM3 | SEQ ID NO: 158 | junctional adhesion molecule 3 |
| 222859_s_at | 0.00072460 | 24.0 | 133.1 | DAPP1 | SEQ ID NO: 114 | dual adaptor of phosphotyrosine and 3- |
| | | | | | | phosphoinositides |
| 208595 s at | 0.00074160 | 263.9 | 122.8 | MBD1 | SEQ ID NO: 54 | methyl-CpG binding domain protein 1 |
| 212015 X at | 0.00075720 | 5744.3 | 3435.4 | PTBP1 | SEQ ID NO: 63 | polypyrimidine tract binding protein 1 |
| 219856 at | 0.00075780 | 13.9 | 230.4 | SARG | SEQ ID NO: 95 | specifically androgen-regulated protein |
| 38766 at | 0.00075940 | 85.9 | 281.7 | SRCAP | SEQ ID NO: 189 | Snf2-related CBP activator protein |
| P204744 s at | 0.00076150 | 7537.7 | 3827.7 | IARS | SEQ ID NO: 38 | isoleucine-tRNA synthetase |
| 239196 at | 0.00076210 | 30.5 | 550.5 | ANKRD22 | SEQ ID NO: 180 | ankyrin repeat domain 22 |
| 203718 at | 0.00076760 | 424.0 | 138.4 | NTE | SEQ ID NO: 32 | neuropathy target esterase |
| 232149_s_at | 0.00076810 | 414.2 | 127.6 | NSMAF | SEQ ID NO: 161 | neutral sphingomyelinase (N-SMase) |
| | | | | | | activation associated factor |
| 202264_s_at | 0.00076920 | 1513.7 | 830.7 | TOMM40 | SEQ ID NO: 11 | translocase of outer mitochondrial membrane |
| | | | | | | 40 homolog (yeast) |
| 32069 at | 0.00077000 | 147.8 | 266.2 | N4BP1 | SEQ ID NO: 187 | Nedd4 binding protein 1 |
| 216862 s at | 0.00078160 | 901.3 | 359.6 | MTCP1 | SEQ ID NO: 79 | mature T-cell proliferation 1 |
| 220370 s at | 0.00079540 | 306.1 | 60.5 | USP36 | SEQ ID NO: 101 | ubiquitin specific protease 36 |
| 242191 at | 0.00080180 | 152.0 | 35.5 | | SEQ ID NO: 185 | LOC400781 |
| 203109_at | 0.00081840 | 2445.5 | 1097.7 | UBE2M | SEQ ID NO: 21 | ubiquitin-conjugating enzyme E2M (UBC12 |
| | | | | | | homolog, yeast) |
| 205780 at | 0.00083050 | 39.8 | 941.1 | | SEQ ID NO: 46 | |
| 203440 at | 0.00\083250 | 503.5 | 78.6 | CDH2 | SEQ ID NO: 30 | cadherin 2, type 1, N-cadherin (neuronal) |
| 238513_at | 0.00083510 | 73.6 | 618.6 | TMG4 | SEQ ID NO: 175 | transmembrane gamma-carboxyglutamic acid |
| | | | | | | protein 4 |
| 221550_at | 0.00083680 | 414.1 | 200.9 | COX15 | SEQ ID NO: 103 | COX15 homolog, cytochrome c oxidase |
| | | | | | | assembly protein (yeast) |
| 229030 at | 0.00084650 | 5.9 | 70.1 | | SEQ ID NO: 151 | |
| 226400 at | 0.00088590 | 2284.5 | 4256.7 | | SEQ ID NO: 135 | |
| 37966 at | 0.00090730 | 127.8 | 9.3 | PARVB | SEQ ID NO: 188 | parvin, beta |
| 212424 at | 0.00092430 | 381.6 | 115.2 | PDCD11 | SEQ ID NO: 68 | programmed cell death 11 |
| 228441 s at | 0.00093570 | 12.0 | 49.8 | | SEQ ID NO: 147 | |
| 203328 x at | 0.00095810 | 411.3 | 112.2 | IDE | SEQ ID NO: 27 | insulin-degrading enzyme |
| 201680 x at | 0.00095980 | 1383.3 | 765.5 | ARS2 | SEQ ID NO: 7 | arsenate resistance protein ARS2 |
| 243302 at | 0.00096750 | 14.2 | 29.1 | | SEQ ID NO: 186 | |
| 219969 at | 0.00097320 | 102.8 | 21.4 | CXorf15 | SEQ ID NO: 98 | chromosome X open reading frame 15 |
| 212016 s at | 0.00099210 | 4187.6 | 2276.0 | PTBP1 | SEQ ID NO: 64 | polypyrimidine tract binding protein 1 |

### Example 1B

[0126] The following example describes the identification of a biomarker panel that discriminates erlotinib-sensitive cell lines from erlotinib-resistant cell lines.

[0127] Methods: Erlotinib sensitivity is determined in 18 NSCLC cell lines using MTT assays. Cell lines are classified as erlotinib sensitive (IC₅₀<1 μM), resistant (IC₅₀>10 μM) or intermediate sensitivity (10 μM<IC₅₀>1). Oligonucleotide gene arrays (Affymetrix® Human Genome U133 set, 39,000 genes) are done on 10 cell lines. Three distinct filtration and normalization algorithms to process the expression data are used, and a list of genes are generated that are both statistically significant (unadjusted p=0.001 cutoff) and corrected for false positive occurrence. This approach is used in combination with 5 distinct machine learning algorithms used to build a test set for predictor genes that are successful for 100% of the test cases. The best discriminators (>3 fold difference in expression between sensitive and resistant cell lines) are selected for Real-time RT-PCR.

[0128] Results: A list of genes is generated initially from the Affymetrix array analysis. By using the mathematical algorithm, 10-20 different candidate genes are selected for RT-PCR.

[0129] Conclusion: Based on NSCLC cell line studies it is possible to identify genes which strongly discriminate erlotinib sensitive cell lines from the resistant ones.

### Example 1C

[0130] The following example describes the identification of a biomarker panel that discriminates lapatinib-sensitive cell lines from lapatinib-resistant cell lines.

[0131] Methods: Lapatinib sensitivity is determined in 18 NSCLC cell lines using MTT assays. Cell lines are classified as lapatinib sensitive (IC₅₀<1 μM), resistant (IC₅₀>10 μM) or intermediate sensitivity (10 μM<IC₅₀>1). Oligonucleotide gene arrays (Affymetrix® Human Genome U133 set, 39,000 genes) are done on 10 cell lines. Three distinct filtration and normalization algorithms to process the expression data are used, and a list of genes are generated that are both statistically significant (unadjusted p=0.001 cutoff) and corrected for false positive occurrence. This approach is used in combination with 5 distinct machine learning algorithms used to build a test set for predictor genes that are successful for 100% of the test cases. The best discriminators (>3 fold difference in expression between sensitive and resistant cell lines) are selected for Real-time RT-PCR.

[0132] Results: A list of genes is generated initially from the Affymetrix array analysis. By using the mathematical algorithm, 10-20 different candidate genes are selected for RT-PCR.

[0133] Conclusion: Based on NSCLC cell line studies it is possible to identify genes which strongly discriminate lapatinib sensitive cell lines from the resistant ones.

### Example 2

[0134] The following example describes the identification and further investigation of a target gene identified using the gene expression profile disclosed herein.

[0135] In this experiment, the present inventors describe research to examine the influence of E-cadherin-regulatory molecules on non-small cell lung cancer (NSCLC) response to EGF receptor (EGFR) inhibitors.

[0136] The EGFR, a member of the erbB family of tyrosine kinases (erbB1-4) plays a major role in transmitting stimuli that lead to NSCLC cellular proliferation and survival. EGFR, highly expressed in NSCLC, is a primary target for NSCLC therapeutic intervention. In clinical trials, 11-20% of patients with chemo-refractory advanced stage NSCLC responded to treatment with EGFR inhibitors such as gefitinib (Iressa®, ZD1839). Currently, there are no markers that predict which patients will respond to treatment. NSCLC patients with poor survival have decreased expression of E-cadherin, a cell adhesion molecule. E-cadherin expression is regulated by the wnt pathway and by zinc finger transcription factors including δEF1/ZEB1 and SIP1/ZEB2. Higher levels of protein expression of E-cadherin were detected in gefitinib sensitive NSCLC cell lines and expression was absent in gefitinib resistant lines. Conversely, expression of the E-cadherin inhibitors ZEB1 and SEP1 was higher in gefitinib resistant cell lines. The hypothesis of this project is that expression of E-cadherin and its regulatory molecules predict response to EGFR inhibitors, and modulating E-cadherin regulatory proteins may augment response to EGFR inhibitors in non-small cell lung cancer.

[0137] E-cadherin, a calcium-dependent epithelial cell adhesion molecule, plays an important role in tumor invasiveness and metastatic potential. Reduced E-cadherin expression is associated with tumor cell dedifferentiation, advanced stage and reduced survival in patients with NSCLC. At the transcriptional level, the wnt/β-catenin signaling pathway regulates DE-cadherin expression. The present inventors have reported that inhibition of GSK3β, involved in the proteasomal degradation of β-catenin, lead E-cadherin upregulation (FIG. 2). E-cadherin transcription is also regulated by zinc finger transcription factors including, Snail, Slug, ZEB1 and SIP1. They repress E-cadherin expression by binding to its promoter and recruiting HDAC (FIG. 2). The inventors have reported that inhibiting the ZEB1 or HDAC expression lead to upregulation of E-cadherin in NSCLC cell lines.

[0138] In this experiment, the inventors used NSCLC cell lines to: (1) evaluate the growth inhibitory properties of EGFR inhibitors by MTT assays, (2) to identify molecular molecules through DNA microarrays and westerns that predict response to EGFR inhibitors and (3) to design combination therapies that enhance the effect of the EGFR inhibitors. Cell lines were screened for expression of members of the EGFR and Wnt signaling pathways. E-cadherin expression was found to be lacking in gefitinib resistant cell lines and activated in gefitinib sensitive lines. Therefore, the expression of zinc finger transcription factors involved in E-cadherin repression was investigated. It was determined that gefitinib resistant lines have high ZEB1 and/or SIP1 expression, and expression is lacking in gefitinib-sensitive lines.

[0139] The inventors proposed that SIP1 and ZEB1 expression predicts EGFR tyrosine kinase inhibitors resistance and that modulating the molecular mechanism that regulate E-cadherin expression will enhance sensitivity to EGFR inhibitors. The proposal will be tested by manipulating E-cadherin expression and measuring the effect on response to gefitinib. Results of this work will be evaluated in clinical trials in patients with NSCLC.

### RESULTS

[0140] EGFR, pEGFR, Her2, ErbB3 and Erb4 Expression in NSCLC:

[0141] EGFR, Her-2 and ErbB3 cell surface expression was evaluated using flow cytometry (Table 2). The majority of NSCLC cell lines (15/18) had a high percentage of EGFR positive cells and three had low or no EGFR expression. The two BAC cell lines, H322 and H358, had high expression of EGFR and Her2.

TABLE 2

| | FACS | FACS | FACS | |
|---|---|---|---|---|
| | % EGFR/ | % Her2/ | % ErbB3/ | IC 50 uM |
| Cell Line | MFI | MFI | MFI | ZD 1839 |
| Adenocarcinoma | | | | |
| Calu3 | 98%/8.9 | 100/37 | 32/4.3 | <1 |
| Colo699 | 0/0 | 0/0 | 57/2.3 | 4.1 |
| H125 | 100/34 | 91/2.8 | 0/0 | 4.7 |
| H2122 | 94/5.1 | 73/4 | 80/5 | 4.8 |
| H1435 | 98/14 | ND | 94/6.4 | 7.6 |
| A549 | 99/14 | 72/2.4 | 54/3.5 | 8.4 |
| H441 | 78/6.9 | 79/2.6 | 0/0 | 11.7 |
| HI 648 | 98/5.7 | 78/2.7 | 0/0 | 11.5 |
| Bronchoalveolar | | | | |
| H322 | 100/16 | 96.5.5 | ND | <1 |
| H358 | ND | ND | ND | <1 |
| Squamous Cell | | | | |
| NE18 | 100/16 | 98/3.3 | 35/5.7 | 8 |
| H1703 | 99/15 | 65/2.6 | 0/0 | 9.3 |
| H157 | 93/13 | 62/1.8 | 0/0 | 10.1 |
| H520 | 0/0 | 0/0 | 0/0 | 10.3 |
| H1264 | 100/14 | 43/1.9 | 0/0 | 10.2 |
| Large Cell | | | | |
| H1334 | 100/23 | 74/3.2 | 99/10 | 3.8 |
| H460 | 37/1.9 | 57/1.4 | 0/0 | 9/9 |

[0142] The presence of phosphorylated EGFR (pEGFR) versus EGFR was evaluated by Western blotting in 18 NSCLC cell lines (FIG. 3, shows 15 cell lines). EGFR was detected in the majority of NSCLC cell lines, whereas only a subset of these cell lines had (pEGFR).

[0143] Effects of EGFR Inhibitors on Human Lung Cancer Cells Growth:

[0144] The growth inhibitory effect of gefitinib, on 18 NSCLC cell lines was evaluated using the MTT assay (Table 2). There was no correlation between the EGFR expression and gefitinib response. The change in pEGFR following gefitinib treatment was evaluated in two sensitive cell lines, H1334 and H322, and two resistant cell lines, H1264 and H1648 (FIG. 4). Gefitinib inhibited the phosphorylated “active” form of EGFR in sensitive cell lines.

[0145] Based on the in vitro experiments, athymic nude mice bearing human NSCLC xenografts were treated with EGFR inhibitors ZD1839 or C225. Growth delay was evident in tumors after treatment with either agent (FIG. 5).

[0146] E-Cadherin, SIP1 and ZEB1 in NSCLC Cell Lines Using Microarray and RT-PCR and Western Blotting:

[0147] High density oligonucleotide microarray (IOAM) analysis of gene expression levels of selected genes was developed from 11 NSCLC cell lines. These cell lines included 2 gefitinib sensitive lines (IC₅₀<1 μM), 5 gefitinib resistant lines (IC₅₀≧1 μM), and 4 lines with intermediate sensitivity (IC₅₀>1 μM, 10 μM). The expression of E-cadherin, SIP1 and ZEB1 was evaluated and compared to their expression in normal bronchial epithelium using the Gene Spring program (FIG. 6).

[0148] E-cadherin expression was more pronounced in gefitinib sensitive lines and absent in gefitinib resistant lines. This expression pattern was confirmed using western blotting and real time PCR (RT-PCR) (FIG. 7).

[0149] As discussed above, regulation of E-cadherin expression involves the zinc finger transcription factors ZEB1 and SIP1. Expression of both transcription factors was evaluated using real time RT-PCR. ZEB1 and SIP1 were expressed in the gefitinib resistant lines and absent in the gefitinib sensitive lines (FIG. 8). The expression of Slug, Snail, Wnt7a, β-catenin, γ-catenin, α-catenin and GSK3β was also evaluated using Western blot analysis or RT-PCR. None of theses molecules had a differential pattern of expression in the NSCLC lines (data not shown).

[0150] In summary, there was no correlation between gefitinib sensitivity and EGFR expression. E-cadherin was detected preferentially in gefitinib sensitive lines.

[0151] Conversely, the zinc finger transcription factors, ZEB1 and SIP1, involved in E-cadherin inhibition were expressed in gefitinib resistant lines and absent in gefitinib sensitive lines.

### Example 3

[0152] This example describes the evaluation of the detrimental effect of the zinc finger proteins ZEB1 and SIP1 on NSCLC cell lines sensitivity to EGFR inhibitors.

[0153] In the first part of this experiment, adenoviral constructs containing ZEB1 or SIP1 are used to overexpress these proteins in gefitinib sensitive cell lines. MTT assay will assess changes in gefitinib sensitivity. In the second part of this experiment, stably transfected ZEB1 and SIP1 cell lines and untransfected cell lines are implanted into nude mice. Transplanted mice are treated with gefitinib and the response is compared between the two groups.

### Example 4

[0154] This example describes the determination of the molecular mechanisms that improve the response to EGFR inhibitors in NSCLC cell lines in vitro and in vivo.

[0155] In the first part of this experiment, the effect of “silencing” the E-cadherin transcriptional repressors, SIP1 and ZEB1, on NSCLC cell lines response to ZD1839 is examined. To directly examine the role of the zinc-finger transcription factors, SIP1 and ZEB1 on gefitinib responsive lines, the effect of siRNA is developed and tested (FIG. 9). siRNA is prepared for different regions of SIP1 and ZEB1 using the silencer kit from Dharmacon (Colorado).

[0156] Their efficacy is tested by RT-PCR. The most effective siRNA for SIP1 and ZEB1 are then introduced, individually or in combination, into gefitinib resistant lines. The effect of these siRNAs on gefitinib responsiveness is evaluated by MTT assay. ZEB1 antibody (Santa Cruz, Calif.) and SIP1 antibody (a gift from Dr. van Grunsven) are used to evaluate the efficacy of RNA inhibition.

[0157] In the second part of this experiment, the effect of inhibiting GSK3β on gefitinib response in NSCLC cell lines is examined. GSK3β phosphorylates β-catenin leading to its ubiquitination and destruction. GSK3β inhibitors, such as lithium, increased E-cadherin expression in NSCLC cell lines. GSK3β function is inhibited with an adenovirus (pAdTrack-CMV) encoding a dominant-negative GSK3β (dnGSK3β). To determine the effectiveness of this dnGSK3β the expression of non-phosphorylated β-catenin and E-cadherin is evaluated by western blot. NSCLC cell lines stably transfected with the dnGSK3β construct are generated. The effect of inhibiting GSK3β on NSCLC cell lines response to gefitinib are evaluated using MTT assays.

[0158] In the third part of this experiment, the effect of E-cadherin on gefitinib sensitivity is evaluated. Resistant NSCLC lines are transfected with E-cadherin encoding constructs. Changes in NSCLC cell lines response to gefitinib are assessed by MTT assay. Gefitinib-sensitive lines that express E-cadherin are treated with an E-cadherin antibody (Zymed) and the effect on gefitinib responsiveness assessed by MTT assay. The results determine whether expression of E-cadherin itself is sufficient to determine gefitinib sensitivity, or if sensitivity is a reflexion of events occurring upstream of it.

[0159] In the fourth part of this experiment, the effect of gefitinib responsiveness on NSCLC cell lines is augmented in vivo. Based on findings from the above in vitro experiments, the best treatment that enhances gefitinib sensitivity in NSCLC cell lines is selected for in vivo experiments in nude mice. Previously, the inventors showed an inhibitory effect of gefitinib alone on NSCLC xenografts growth (see above). The combination of gefitinib with one of the above-evaluated interventions is tested in athymic nude mice bearing human NSCLC xenografts. E-cadherin inducible cell lines from the in vitro experiments are inoculated subcutaneously in nude mice. Mice are treated with gefitinib with and without the agent that improved the gefitinib sensitivity. The two groups are evaluated for differences in tumor growth inhibition. Expression of E-cadherin, SIP1 and ZEB1 are evaluated both prior to and post-treatment by real-time RT-PCR and immunohistochemistry. ZEB1 antibody (Santa Cruz, Calif.) and SIP1 antibody (a gift from Dr. van Grunsven) are used in the immunohistochemistry. However, new antibodies can readily be generated if the above antibodies are not effective at detecting proteins in the IHC assays.

[0160] The results of these experiments dissect out the events leading to gefitinib resistance in order to develop treatment modifications that bypass resistance.

### Example 5

[0161] The following example describes the identification of a biomarker panel that discriminates lapatinib-sensitive colon cancer cell lines from lapatinib-resistant colon cancer cell lines. A colon cancer cell line is evaluated for genes that discriminate between lapatinib-sensitive and lapatinib-resistant cell lines. Lapatinib sensitivity is determined in multiple established colon cancer cell lines that are classified as either lapatinib sensitive or lapatinib-resistant. Oligonucleotide gene arrays (Affymetrix® Human Genome U133 set, 39,000 genes) are done on the cell lines. At least three distinct filtration and normalization algorithms to process the expression data are used, and a list of expressed genes is generated. This approach is used in combination with at least five distinct machine learning algorithms to identify and build a test set of sensitivity-predictor genes. The identified sensitivity-predictor genes are selected for RT-PCR testing/screening and verified via RT-PCR for discrimination between lapatinib-sensitive and lapatinib-resistant cell lines.

### Example 6

[0162] The following example describes the identification of a biomarker panel that discriminates gefitinib-sensitive breast cancer cell lines from gefitinib-resistant breast cancer cell lines. A breast cancer cell line is evaluated for genes that discriminate between gefitinib-sensitive and gefitinib-resistant cell lines. Gefitinib sensitivity is determined in multiple established breast cancer cell lines that are classified as either gefitinib sensitive or gefitinib-resistant. Oligonucleotide gene arrays (Affymetrix®) Human Genome U133 set, 39,000 genes) are done on the cell lines. At least three distinct filtration and normalization algorithms to process the expression data are used, and a list of expressed genes is generated. This approach is used in combination with at least five distinct machine learning algorithms to identify and build a test set of sensitivity-predictor genes. The identified sensitivity-predictor genes are selected for RT-PCR testing/screening and verified via RT-PCR for discrimination between gefitinib-sensitive and gefitinib-resistant cell lines.

### Example 7

[0163] The following example describes the identification of a biomarker panel that discriminates erlotinib-sensitive non-small cell lung cancer cell lines from erlotinib-resistant non-small cell lung cancer cell lines. A non-small cell lung cancer cell line is evaluated for genes that discriminate between erlotinib-sensitive and erlotinib-resistant cell lines. Erlotinib sensitivity is determined in multiple established non-small cell lung cancer cell lines that are classified as either erlotinib-sensitive or erlotinib-resistant. Oligonucleotide gene arrays (Affymetrix® Human Genome U133 set, 39,000 genes) are done on the cell lines. At least three distinct filtration and normalization algorithms to process the expression data are used, and a list of expressed genes is generated. This approach is used in combination with at least five distinct machine learning algorithms to identify and build a test set of sensitivity-predictor genes. The identified sensitivity-predictor genes are selected for RT-PCR testing/screening and verified via RT-PCR for discrimination between erlotinib-sensitive and erlotinib-resistant cell lines.

### Example 8

[0164] The following example describes the identification of a biomarker panel that discriminates erlotinib-sensitive breast cancer cell lines from erlotinib-resistant breast cancer cell lines. A breast cancer cell line is evaluated for genes that discriminate between erlotinib-sensitive and resistant cell lines. Erlotinib sensitivity is determined in multiple established breast cancer cell lines that are classified as either erlotinib sensitive or erlotinib-resistant. Oligonucleotide gene arrays (Affymetrix® Human Genome U133 set, 39,000 genes) are done on the cell lines. At least three distinct filtration and normalization algorithms to process the expression data are used, and a list of expressed genes is generated. This approach is used in combination with at least five distinct machine learning algorithms to identify and build a test set of sensitivity-predictor genes. The identified sensitivity-predictor genes are selected for RT-PCR testing/screening and verified via RT-PCR for discrimination between erlotinib-sensitive and erlotinib-resistant cell lines.

### Example 9

[0165] The following example describes the identification of a biomarker panel that discriminates lapatinib-sensitive colorectal cancer cell lines from lapatinib-resistant colorectal cancer cell lines. A colorectal cancer (CRC) cell line is evaluated for genes that discriminate between lapatinib-sensitive and lapatinib-resistant cell lines. Lapatinib sensitivity is determined in multiple established CRC cancer cell lines that are classified as either lapatinib sensitive or lapatinib-resistant. Oligonucleotide gene arrays (Affymetrix® Human Genome U133 set, 39,000 genes) are performed on the CRC cell lines. At least three distinct filtration and normalization algorithms to process the expression data are used, and a list of expressed genes is generated. This approach is used in combination with at least five distinct machine learning algorithms to identify and build a test set of sensitivity-predictor genes. The identified sensitivity-predictor genes are selected for RT-PCR testing/screening and verified via RT-PCR for discrimination between lapatinib-sensitive and lapatinib-resistant CRC cell lines.

### Example 10

[0166] The following example describes the identification of a biomarker panel that discriminates erlotinib-sensitive pancreatic cancer cell lines from erlotinib-resistant pancreatic cancer cell lines. A pancreatic cancer cell line is evaluated for genes that discriminate between erlotinib-sensitive and erlotinib-resistant cell lines. Erlotinib sensitivity is determined in multiple established pancreatic cancer cell lines that are classified as either erlotinib-sensitive or erlotinib-resistant. Oligonucleotide gene arrays (Affymetrix® Human Genome U133 set, 39,000 genes) are performed on the pancreatic cancer cell lines. At least three distinct filtration and normalization algorithms to process the expression data are used, and a list of expressed genes is generated. This approach is used in combination with at least five distinct machine learning algorithms to identify and build a test set of sensitivity-predictor genes. The identified sensitivity-predictor genes are selected for RT-PCR testing/screening and verified via RT-PCR for discrimination between erlotinib-sensitive and erlotinib-resistant pancreatic cell lines.

### Example 11

[0167] In this example, a method to identify and correlate specific gene expression products in breast cancer that predict responsiveness to erlotinib. Breast cancer cell lines are treated with varying dosages of erlotinib, including the recommended and established ranges for the commercially available product. EGFR, Her2, ErbB3, Her3, and E-cadherin cell surface expression on the established breast cancer cell lines is evaluated by flow cytometry with antibodies specific to each cell-surface marker. After determining the cell-surface expression levels of the identified markers, the presence of phosphorylated forms for each marker are assayed via western blotting. Detection of phosphorylated proteins is achieved via the use of commercial/established antibodies for such molecules. Finally, inhibition of growth in the breast cancer cell lines following treatment with erlotinib is determined by MTT assay using established methods and detection techniques known in the art. The correlation of marker expression, marker phosphorylation, and growth inhibition in response to erlotinib treatment can establish which markers are predictive of erlotinib sensitivity.

### Example 12

[0168] In this example, a method to identify and correlate specific gene expression products in colorectal cancer that predict responsiveness to lapatinib. Colorectal cancer (CRC) cell lines are treated with varying dosages of lapatinib, including the recommended and established ranges for the commercially available product. EGFR, Her2, ErbB3, Her3, and E-cadherin cell surface expression on the established CRC cancer cell lines is evaluated by flow cytometry with antibodies specific to each cell-surface marker. After determining the cell-surface expression levels of the identified markers, the presence of phosphorylated forms for each marker are assayed via western blotting. Detection of phosphorylated proteins is achieved via the use of commercial/established antibodies for such molecules. Finally, inhibition of growth in the CRC cancer cell lines following treatment with lapatinib is determined by MTT assay using established methods and detection techniques known in the art. The correlation of marker expression, marker phosphorylation, and growth inhibition in response to lapatinib treatment can establish which markers are predictive of lapatinib sensitivity.

### Example 13

[0169] In this example, a method to identify and correlate specific gene expression products in breast cancer that predict responsiveness to gefitinib. Breast cancer cell lines are treated with varying dosages of gefitinib, including the recommended and established ranges for the commercially available product. EGFR, Her2, ErbB3, Her3, and E-cadherin cell surface expression on the established breast cancer cell lines is evaluated by flow cytometry with antibodies specific to each cell-surface marker. After determining the cell-surface expression levels of the identified markers, the presence of phosphorylated forms for each marker are assayed via western blotting. Detection of phosphorylated proteins is achieved via the use of commercial/established antibodies for such molecules. Finally, inhibition of growth in the breast cancer cell lines following treatment with gefitinib is determined by MTT assay using established methods and detection techniques known in the art. The correlation of marker expression, marker phosphorylation, and growth inhibition in response to gefitinib treatment can establish which markers are predictive of gefitinib sensitivity.

### Example 14

[0170] In this example, a method to identify and correlate specific gene expression products in non-small cell lung cancer that predict responsiveness to erlotinib. Non-small cell lung cancer cell lines are treated with varying dosages of erlotinib, including the recommended and established ranges for the commercially available product. EGFR, Her2, ErbB3, Her3, and E-cadherin cell surface expression on the established non-small cell lung cancer cell lines is evaluated by flow cytometry with antibodies specific to each cell-surface marker. After determining the cell-surface expression levels of the identified markers, the presence of phosphorylated forms for each marker are assayed via western blotting. Detection of phosphorylated proteins is achieved via the use of commercial/established antibodies for such molecules. Finally, inhibition of growth in the non-small cell lung cancer cell lines following treatment with erlotinib is determined by MTT assay using established methods and detection techniques known in the art. The correlation of marker expression, marker phosphorylation, and growth inhibition in response to erlotinib treatment can establish which markers are predictive of erlotinib sensitivity.

### Example 15

[0171] In this example, a method to identify and correlate specific gene expression products in pancreatic cancer that predict responsiveness to erlotinib. Pancreatic cancer cell lines are treated with varying dosages of erlotinib, including the recommended and established ranges for the commercially available product. EGFR, Her2, ErbB3, Her3, and E-cadherin cell surface expression on the established pancreatic cancer cell lines is evaluated by flow cytometry with antibodies specific to each cell-surface marker. After determining the cell-surface expression levels of the identified markers, the presence of phosphorylated forms for each marker are assayed via western blotting. Detection of phosphorylated proteins is achieved via the use of commercial/established antibodies for such molecules. Finally, inhibition of growth in the pancreatic cancer cell lines following treatment with erlotinib is determined by MTT assay using established methods and detection techniques known in the art. The correlation of marker expression, marker phosphorylation, and growth inhibition in response to erlotinib treatment can establish which markers are predictive of erlotinib sensitivity.

[0172] While various embodiments of the present invention have been described in detail, it is apparent that modifications and adaptations of those embodiments will occur to those skilled in the art. It is to be expressly understood, however, that such modifications and adaptations are within the scope of the present invention, as set forth in the following claims.

1. A diagnostic method comprising:
a) providing a sample of cancer cells from a patient to be tested;
b) detecting in the sample the expression of at least one gene chosen from a panel of genes whose expression has been correlated with sensitivity or resistance to a kinase inhibitor with anti-EGFR activity, wherein the at least one gene is chosen from a gene comprising, or expressing a transcript comprising, a nucleic acid sequence selected from the group consisting of SEQ ID NOs 1-195; and
c) comparing the level of expression of at least one gene detected in the patient sample to a level of expression of at least one gene that has been correlated with sensitivity or resistance to the kinase inhibitor with anti-EGFR activity.

2. The diagnostic method of claim 1, wherein the kinase inhibitor is a dual-kinase inhibitor.

3. The diagnostic method of claim 1, wherein the kinase inhibitor is gefitinib, erlotinib, or lapatinib.

4. The diagnostic method of claim 1, wherein the cancer cells are of epithelial origin.

5. The diagnostic method of claim 1, wherein the cancer cells are selected from breast cancer cells, skin cancer cells, bladder cancer cells, colon cancer cells, prostate cancer cells, uterine cancer cells, cervical cancer cells, ovarian cancer cells, esophageal cancer cells, stomach cancer cells, gastrointestinal cancer cells, pancreatic cancer cells, laryngeal cancer cells, and lung cancer cells.

6. The diagnostic method of claim 1 further comprising:
d) selecting the patient as being predicted to benefit from therapeutic administration of the kinase inhibitor with anti-EGFR activity.

7. The diagnostic method of claim 6, wherein the expression of at least one gene in the patient's cancer cells is statistically more similar to the expression levels of at least one gene that has been correlated with sensitivity to the kinase inhibitor than to resistance to the kinase inhibitor.

8. The diagnostic method of claim 6, wherein the expression of at least one gene in the patient's cancer cells is statistically more similar to the expression levels of at least one gene that has been correlated with resistance to the kinase inhibitor than to sensitivity to the kinase inhibitor.

9. The diagnostic method of claim 1, wherein the panel of genes in (b) is identified by a method comprising:
a) providing a sample of cells that are sensitive or resistant to treatment with the kinase inhibitor with anti-EGFR activity;
b) detecting the expression of at least one gene in the kinase inhibitor-sensitive cells as compared to the level of expression of the gene or genes in the kinase inhibitor-resistant cells; and
c) identifying a gene or genes having a level of expression in the kinase inhibitor-sensitive cells that is statistically significantly different than the level of expression of the gene or genes in the kinase inhibitor-resistant cells.

10. The method of claim 1, wherein expression of the gene(s) is detected by a method selected from the group of: (i) measuring amounts of transcripts of the gene in the tumor cells;
(ii) detecting hybridization of at least a portion of the gene or a transcript thereof to a nucleic acid molecule comprising a portion of the gene or a transcript thereof in a nucleic acid array; and
(iii) detecting the production of a protein encoded by the gene.

11. The method claims 1, comprising detecting expression of at least one gene selected from the group consisting of: E-cadherin (represented by SEQ ID NO:3).

12. The method of claim 1, comprising detecting expression of ErbB3 (represented by SEQ ID NO:15 or SEQ ID NO:133).

13. The method of claim 1, comprising detecting expression of Vimentin (represented by SEQ ID NO:195).

14. The method of claim 1, comprising detecting expression of Her3.

15. The method claim 1, further detecting expression of at least one gene selected from the group consisting of ZEB1 and SIP1.

The application's sequence listing, which the Patent Office published only in electronic form, follows.

SEQUENCE LISTING (195 sequences)

SEQ ID NO: 1 - DNA, 12010 bp, Homo sapiens
  misc_feature (1)..(12010): n = a,c,t, or g
ctggaggaggacaaagggatgggggagtatcccccactcctcctacctcctggggtgacctgccttccttgtctttagacccgccctcgtctccaaggcaactcagcctttcctcagtccctcagaggcagccaccttctggaagtgggaactggggggactggatgtctgggtctcaggaaggcagagcagggataactgggcccaagatgccctgaacctgataagaggtggcagtcgagtccctcaggactccagggcctggagacttcagtacagggctctgagaccagtacaggttaggatagcttttcctgcagcaggggaggggagagtagttacttgggtttgtaaggagatgccatttagaatagttttatgtggggtaagcttcctgggcctgaggaacagagtagggattttcaaactttaatgggcacaggtcacctgggaattgtgttaaaaggcagatttggattgaacaggtcaagggtgagcctgagattctgatttcttccatgcttccaggtattgctgatggtccagggaccaccctgggcctagagggctatagggggacagtaagactagaaggtgctggggtcccctctgcccttctcttagaattctggactcctatgtgggagggcaacagggtgagctggtccaggcttatctgatgtttaattctatcatatcctcaacaaggaattgcccaacctttcctgggacatatttattttttaaaagtccaaatgattttcatattcttttacatatcttatgattttacataaatgcatttatgttacaagatttagaaaaatagtacaatcaacctgtctttttaaatttgcttttcttttgccccgttcatgttaactcttgttatattgtatgctattgttatattctattatatattctctccttctagacgtacacacaggtatatatacaaacatgggtgcttgtttattctattttcaaaaggtgggagattttttatacttctgttgcttgcttttcatattcaacagatatacatggaaatcacacaaagttaggaatatattgcctctttgttacttttcatagctgcatagtagtcaataaaccttattttttttaattccagcctgtcccctgtgggcattcacatatcttacagatttatgtcttacaaaaggtaccataataaacatctttgaaatcttcttttttatttttatttttcactttttttaaaagagatggggtctcactatgttcaccaggctggtctctaactcctggcctcaagtgatcctcccatctcggcctcccaaagtgctggggttacaggcatgagccaccagacccagacctgcacatatgttcttacttcctggtgcttctctctcgagggaatgctgggtcgaagaggatgtgcatttttaattataatagacattgctagattgctttccaaatagaagataacactcatttctgccattgagcatggtgcctcccttttcatcactttctaccacttttatatgttacagccttaaaaaaatatcttgtcagtctgcttggtatttccctgaggctagtgaatttgaccattaaaaaaaatgtttgttggcaatttggctttgcttttctgtgaaatgactatccacattctttggctgtttctttattgggttacttatatattttttcttgtcagttcctaaggggccttagtttattgtagttattaaaccttttcctgttgtatgtgttataaacattttttgcacacttgttgtttgttctaagccgttgtttatggggatattttgcccattcctgattggggaaatggggctttaggaagttatttaactgatctctgccctagtttcttcatgtgttaaatatggatagtaatagtatctaccttatgaagtgactgtgaagataaaattatggattctgtttaagggtttaggccagtgtctggcacaggggaagcattctaaaaatatagctgatgctgttaaacaatgactgttgttgttgttttactgttattatccccaaagcggcccattctgtctgttgctgtcagctatgactcagtcccctgattaacttacgcaccacccattttatcccctgcagagatgctgcccccacccccttaggcccgagggatcaggagctatgggaccagaggccctgtcatctttactgctgctgctcttggtggcaagtggagatgctgacatgaagggacattttgatcctgccaagtgtcgctatgccctgggcatgcaggaccggaccatcccagacagtgacatctctgcttccagctcctggtcagattccactgccgcccgccacagcaggtacttggcacacctggcacacttgtagctgccccgagaggagctcctgggacctctacttcccctccaacccctctgcccacgccagtgaaacccctgcaggctgagggggcaaatgaagtggggtttaaatactggagatggaggcagacctggggccagatgttctctgtgcccctcttcaccctcaggttggagagcagtgacggggatggggcctggtgccccgcagggtcggtgtttcccaaggaggaggagtacttgcaggtggatctacaacgagtgcacctggtggctctggtgggcacccagggacggcatgccgggggcctgggcaaggagttctcccggagctaccggctgcgttactcccgggatggtcgccgctggatgggctggaaggaccgctggggtcaggaggtgatctcaggcaatgaggaccctgagggagtggtgctgaaggaccttgggccccccatggttgcccgactggttcgcttctacccccgggctgaccgggtcatgagtgtctgtctgcgggtagagctctatggctgcctctggaggggtgagtggctcagcttcctgggaatctgtttcctgagcaggggactggagggtggggagtgtggcgaatggacattttaggatcccttctcctggtgggaagctgtcactctgaggagggggctagccagcattgtctcctccatgccaatgagccagtggagagatacaagaagggacctgaaacctgcccaggcctgatgaagggatgggggatggagtcttagtgcctctgacccccaccctcttattttttcccagatggactcctgtcttacaccgcccctgtggggcagacaatgtatttatctgaggccgtgtacctcaacgactccacctatgacggacataccgtggggggtaagaaaggcccctgcaggatatggagtttggggtgggagggaggactctgtgtgtgtgtgtgtgtgtgtgtgtctgtgtgtgtgtgagtgtgtgtgtgtaggggggctggtaagtagggtggggagtgagatggaagagcagagaagagggatgggtaaggtgggncctcaaagggtaacactagggtgaccactagcccgtatgacactggatgtagaagagtcacccctttgctaacacacattgttggaaattgctccaataaatatacacatcatagattgaaatggtgccccttagaggtggtgcctttgtgctggatgtgacctgcaaggtacctgtagtgctggggtggggtggagagaggagaagggccagctgcatgagtgtgaggcgggatgggaatgggactagtggatgggagccaggctggccatgccactgtgccggagggtggcggagcagaatgcctggatgtcaagaccctcttcccttccaacctcctcttccttggtcccctcttctccggactgcagtatgggggtctgggccagctggcagatggtgtggtggggctggatgactttaggaagagtcaggagctgcgggtctggccaggctatgactatgtgggatggagcaaccacagcttctccagtggctatgtggagatggagtttgagtttgaccggctgagggccttccaggctatgcaggtgagtgagtccggctctcgaggagggctctgaagccatgcagggtgccgttggggtgcccccaccactcctagccttgaccctgtgccctcttcccttccccccaggtccactgtaacaacatgcacacgctgggagcccgtctgcctggcggggtggaatgtcgcttccggcgtggccctgccatggcctgggagggggagcccatgcgccacaacctagggggcaacctgggggaccccagagcccgggctgtctcagtgccccttggcggccgtgtggctcgctttctgcagtgccgcttcctctttgcggggccctggttactcttcagcgaaatctccttcatctctggtaagccctggagtagcccagtctccagtccctgaaattgacaactgagttcattcctaaccctgcagtgtccctaaaatactcattcctcgcattatatctacccatcacccaccgaaacttctcaattaggggtgccccaaataacttgagcccctctctgcctcttgttctctgcgtatccatctttcctttgtaagccccttgcccgtgactattattgagccagtatgacagtactggttgttaaaatattgaaatacttctgtattagttgagaaatagcctcttctctaagcctccagatacctgtcctccacctccccacaatccagcaactatagggttaacacccaccacagctgggtgttccaggaccctgctcccccagcccccactggtcagtggttgcctattgagaatcacccatgcttctgctcctttgcacaacagtccactgcctctgcctcccttgggtctcctcctcatttacctccctcctttctttttgttccttctccccagatgtggtgaacaattcctctccggcactgggaggcaccttcccgccagccccctggtggccgcctggcccacctcccaccaacttcagcagcttgggtgagcaatcttgggtgggcgtgtggaccctctgcacccttctccctgggcctccccctcggctagggtgggaccctcctgtggtgctgaccctgctgcctccaccagagctggagcccagaggccagcagcccgtggccaaggccgaggggagcccgaccgccatcctcatcggctgcctggtggccatcatcctgctcctgctgctcatcattgccctcatgctctggcggctgcactggcgcaggctcctcagcaaggtgggcacagccgtggcatgtggagtggcggggggaggccaggccccagcacgagccagcgtccagtgggacctgcagggcacagcccactagcatcccaagaggagggcttagtaaagagaccacttacaccatgtcaaagagggtatggggctcacagggagggctgctccccagctctgggtctgctcagcggagaggagcaaataccacgacccagaggagagagtctgtggagagggcaccttgacaggggcagtagactttggtcctgggatgcagctggtcccgttatctacccctcagggagggcctgggagagtagatgccctgacctcacttttctgtgccaaactcctgctgggctcctctctggctaaacccaaaccaggcctgttgttgcagtgtacactggtcacccttggggcagaagcagggtagagacaggcagagagtggggttggaggggcaaagggaagacgtctgncacaccccaagccacgtcttccggctggagtccagtggcagtaatatacattaaggttgatgactggacacggtggctcatgcctgtaatcctagcactttgggagaccgaggcgggaggatcacctgaggtcaagagttcgagaccagcctgaccaacatggtgaaatcccatctctactaagaataccaaattagccaggcatggtggctgatgcctgtaatcccagctactcaggaggctgaggcatgaatctcttgaacctgggaggcgaaggttgcagtgagctgagatcatgccatttcacttcagcctgggcgacaagagccaaattccatctccaaaaaacaaacaaaccaaaaaaaacggttgatagttatggactgggcagatgagggttagaatctcattgtggggcagggaagttacctccatgctcttgagcttcactttctctgcctgtaagatggtgctgatagtatccacagctgtagggctcttgtgagggctgagggagggaacgcagggatggacacagcagagggccaggccgtgtgtgctgagcaacacgggtgatgcctcccatccctatgacaaggctgaacggagggtgttggaagaggagctgacggttcacctctctgtccctggggacactatcctcatcaacaaccgcccaggtcctagagagccacccccgtaccaggagccccggcctcgtgggaatccgccccactccgctccctgtgtccccaatggctctggtaagacctgccttgttccagtcgcacctctgtcctctctgctgttttcttattgtatccctttcccattctctttttttcctgtcttccccagtttccacttgttttcttctttctgtgcccctggttactgtctatatcactctttggtccctaccatgtagtctctctcaagagttccccatgtattacccatagtcccccgtggtgctatcttgtctgtgtcccacagacatctctctatctttgttgtaccctctcattgtgtctccctggcccctttgatttgtattagactcaccatgtttggttccttcatctatcctccatcacccatccttccatccatagtcatacatccttgcatccatccatcaatcttccatcatctgtctttctatctatattcataaatctattcatccatccatccacccacccatatccatcatccatctatccatctatattcacacatccatctttccatctgttatccatccatccaacaaacatctgtttaccatccatccatctattcatacgtcccatctgtccatgcattcattatccagccagccgtccgtcactctgcagatccttgttttatcctgtctgtctcttaatgcaatcatcccatcagccctggtcttgccctattcaaggtctccctgtctgtctagccttgagtctcatcccttccccgtgtttcccctcctccttctcccgacagcgttgctgctctccaatccagcctaccgcctccttctggccacttacgcccgtccccctcgaggcccgggcccccccacacccgcctgggccaaacccaccaacacccagggtaagcccctctgcccctgggctccgccaggctccccatacctctactggggcagggaaaagccctcacaccttgcacttcctcctctccccactgtggcctattctgctctcctgagctcccaaggaggaagctcttgtgcccttagctcatctctgctgctgcttgctcttttttaaggtcccccccttgagctgaggagtagaaagcttactggtccccagctcttctccctcctcctcttccacgccatctcttcagctctccagagctagacaggaggttgctgtggtggccccagactatagtaactcctcctttattctccactctctctagagctgcgaggaggagggctctcaccccgggcgcttgccctttccctcacatgtgtcctctctctgcagtcccagaggtgaaggctcatgccccaaccctttccatctgcccctcttctcctcagtgttgccttctcattgtggccccttccccagggctaagaggggacagctctgcttcctctcctgtctgtagacaacttgtgttggggctgtgagcagctgttaccctccctcctctctgtgtgcctctgtctctgcttgttgttgagcttggtgtgttgggttgaaagggttgggagggcttggccccagggggagccaggctgaaagccacgggagagcagctaagtgaaggggagggagctgtggtgaacgggacaagggtttggaaggtggagggtgcctggatgctgggaccatcctgaggcgggagaattcctggggaggaattcttcttccagccaagatttatctcacagtctcttgagagaccctagggaggccctaaaagagtaagactttatgacagttttgctcaaccatattcattgccttgaaaagctctggaatagctaactctcgtcccatgccagtgtcttcctggtttgaggttggcgcatggaatactgggaagatacagcatagacccagtctctcactcaaccgggagacacagggccctccgggaggctgaggtgtggggaactatagctcttgggctgttcctgatgcctcgtcctgtcttctttcccctcacccctgcagcctacagtggggactatatggagcctgagaagccaggcgccccgcttctgcccccacctccccagaacagcgtcccccattatgccgaggctgacattgttaccctgcagggcgtcaccgggggcaacacctatgctgtgcctgcactgcccccaggggcagtcggggatgggccccccagagtggatttccctcgatctcgactccgcttcaaggagaagcttggcgagggccagtttggggaggtaaggagggtgcctacccagtgtctggccctattgtgtgctctgatgccatgcctgcgcatccccctagccaggaaccttagtcatttgtaaccgtgttaatccgtttgaccctgtgaccgcctagcaaacgaacttctttctccaggtgcacctgtgtgaggtcgacagccctcaagatctggttagtcttgatttcccccttaatgtgcgtaagggacaccctttgctggtagctgtcaagatcttacggccagatgccaccaagaatgccaggtgaggaccagggatggcatctggaagaagggaggggaggccgcgaagagtggcgagccatctagagagaacaatggcagagcccaacagaggggtggtatctctgggaggggatttacatgtacgctgggggtggggacgcctggtctgcctgaggtggcgcaggggggtggnggcgctgcggaaggtgtaggccgnccactcggcattcctcttcagcttctcctttgttctccaggaatgatttcctgaaagaggtgaagatcatgtcgaggctcaaggacccaaacatcattcggctgctgggcgtgtgtgtgcaggacgaccccctctgcatgattactgactacatggagaacggcgacctcaaccagttcctcagtgcccaccagctggaggacaaggcagccgagggggcccctggggacgggcaggctgcgcaggggcccaccatcaggtacctgtttacccaggctgggccatgctcagaattcccccaggggatctcctcctctcccctcgcttcagcctgggggaaaagaggggagcgtgggggtgggaagggagagaggttccaggagggcctgggataaggaatgtgtgacaagttaacccaggaatatggacagaaaggctggaggtgactatgcaagagtggtgaagggacttgggccctgccatgacgtcccttctgctttctctcaccctcactcccctctgagtccagattggggagcacaataaaagaagagccccctagtgttggccaggcctgggagattgagagagaagtgacccttggcctcacgtgggcattccacctccacatggggagccagagtgaccgggcccggggagtgggctctctctcctctcctggatgggaatctgcgaagctgcccccagtgaccttctgtcggttcccttctcagctacccaatgctgctgcatgtggcagcccagatcgcctccggcatgcgctatctggccacactcaactttgtacatcgggacctggccacgcggaactgcctagttggggaaaatttcaccatcaaaatcgcagactttggcatgagccggaacctctatgctggggactattaccgtgtgcagggccgggcagtgctgcccatccgctggatggcctgggagtgcatcctcatggtgagcagcccgaggacagccaggttggagcagggcaggtgggagaacactggccgccactcacagccctggtctccatcagtcacacactttctctgggttgcatttacagaatctcatctataatatgaggttctcctagcccaagggactggggaaagcaggagccgcagtgtgatgggcaagaatccaggagccaagagtgggtactggggatggagacagcgtggcagagagctcaagagatgaggttgggggaggaagctggagatagaaggggttgggtagggagaccgaaggtcaggaccagaaagtgggggttgggtggagaggaaggaggagcagaaggaagaggttggtccagggccccctggagagaggaaccagattcatggagacgganaagccagagccccaagggagaggagttggnaaaaggtgcccaccggaggagagtggagagcctgncntcaggagggatcagncctgagtggagcccagagtggatctggggcttccaataggaagggaggggggtcaaccgttgcctgatgtcccctgtctgtttttgctgccttcctctgcatcccaggggaagttcacgactgcgagtgacgtgtgggcctttggtgtgaccgtgtgggaggtgctgatgctctgtagggcccagccctttgggcagctcaccgacgagcaggtcatcgagaacgcgggggagttcttccgggaccagggccggcaggtcagagtggaggagagggaagatgggtccgagncgggggacagaaggggcagagttttcatcttggagactaaagaataattgttccctgactctcaaccacacttccncaatncaggtgtacctgtcccggccgcctgcctgcccgcagggcctatatgagctgatgcttcggtgctggagccgggagtctgagcagcgaccacccttttcccagctgcatcggttcctggcagaggatgcactcaacacggtgtgaatcacacatccagctgcccctccctcagggagcgatccaggggaagccagtgacactaaaacaagaggacacaatggcacctctgccccttcccctcccgacagcccatcacctctaatagaggcagtgagactgcaggctgggcccacccagggagctgatgccccttctccccttcctggacacactctcatgtccccttcctgttcttccttcctagaagcccctgtcgcccacccagctggtcctgtggatgggatcctctccacccacctctagccatcccttggggaagggtggggagaaatataggatagacactggacatggcccattggagcacctgggccccactggacaacactgattcctggacaggtggctgcgcccccagcttctctctccctgtcacacactggaccccactggctgagaatctgggggtgaggaggacaagaaggagaggaaaatgtttccttgtgcctgctcctgtacttgtcctcagcttgggcttcttcctcctccatcacctgaaacactggacctgggggtagccccgccccagccctcagtcaccccccacttcccacctgcagtcttgtagctagaacttctctaagcctatacgtttctgtggagtaaatattgggattggggggaaagagggagcaacggcccatagccttggggttggacatctctagtgtagctgccacattgatttttctataatcacttgggtttgtacatttttggggggagagacacagatttttacactaatatatggacctagcttgaggcaattttaatcccctgcactaggcaggtaataataaaggttgagttttccac

SEQ ID NO: 2 - DNA, 987 bp, Homo sapiens
ccgggatctgctttcaatccgccatcccatggagcatggcatcgtcaaggattggaacgacatggaacgcatttggcaatatgtctattctaaggaccagctgcagactttctcagaggagcatcctgtgctcctgactgaggcgcctttmaacccacgaaaaaaccgggaacgagctgccgaagttttcttcgagaccttcaatgtgcccgctcttttcatctccatgcmagcygtactcagcctttacgctacaggcaggaccacaggggtggtgctggattctggggatggrgtcacccatgctgtgcccatctatgagggctttgccatgccccactccatcatgcgcatcgacatcgcgggccgggacgtctctcgcttcctgcgcctctacctgcgtaaggagggctacgacttccactcatcctctgagtttgagattgtcaaggccataaaagaaagagcctgttacctatccataaacccccaaaaggatgagacgctagagacagagaaagctcagtactacctgcctgatggcagcaccattgagattggtccttcccgattccgggcccctgagttgctcttcaggccagatttgattggagaggagagtgaaggcatccacgaggtcctggtgttcgccattcagaagtcagacatggacctgcggcgcacgctttttctctaacattgtcctctcaggaggctctaccctgttcaaaggttttggtgacaggctcctgagtgaagtgaagaaactagctccaaaagatgtgaagatcaggatatctgcacctcaggagagactgtattccacgtggattgggggctccatccttgcctccctggacacctttaagaagatgtgggtctccaaaaaggaatatgaggaagatggtgcccgatccatccacagaaaaaccttctaatgtcgggacatcatcttcacctctctctgaagttaactccactttaaaa

SEQ ID NO: 3 - DNA, 2808 bp, Homo sapiens
ggaaagcacctgtgagcttggcaagtcagttcagagctccagcccgctccagcccggcccgacccgaccgcacccggcgcctgcctcgctcgggctccccggccagccatgggcccttggagccgcagcctctcgggcctgctgctgctgctgaggtctcctcttggctctcaggagcggagccctcctccctgtttgacgcgagagctacacgttcacggtgccccggcgccacctgagaagaggccgcgtctgggcagagtgaattttgaagattgcaccggtcgacaaaggacagctattttcctgacaccgattccgaaagtgggcacagatggtgtgattacagtcaaaaggcctctacggtttcataacccaacagatccatttcttggtctacgctgggactccacctacagaaagttttccaccaaagtcacgctgaatacagtggggcaccaccaccgccccccgccccatcaggcctccgtttctggaatccaagcagaattgctcacatttcccaactcctctcctggcctcagaagacagaagagagactgggttattcctcccatcagctgcccagaaaatgaaaaaggcccatttcctaaaaacctggttcagatcaaatccaacaaagacaaagaaggcaaggttttctacagcatcactggccaaggagctgacacaccccctgttggtgtctttattattgaaagagaaacaggatggctgaaggtgacagagcctctggatagagaacgcattgccacatacactctcttctctcacgctgtgtcatccaacgggaatgcagttgaggatccaatggagattttgatcacggtaaccgatcagaatgacaacaagcccgaattcacccaggaggtctttaaggggtctgtcatggaaggtgctcttccaggaacctctgtgatggaggtcacagccacagacgcggacgatgatgtgaacacctacaatgccgccatcgcttacaccatcctcagccaagatcctgagctccctgacaaaaatatgttcaccattaacaggaacacaggagtcatcagtgtggtcaccactgggctggaccgagagagtttccctacgtataccctggtggttcaagctgctgaccttcaaggtgaggggttaagcacaacagcaacagctgtgatcacagtcactgacaccaacgataatcctccgatcttcaatcccaccacgtacaagggtcaggtgcctgagaacgaggctaacgtcgtaatcaccacactgaaagtgactgatgctgatgcccccaataccccagcgtgggaggctgtatacaccatattgaatgatgatggtggacaatttgtcgtcaccacaaatccagtgaacaacgatggcattttgaaaacagcaaagggcttggattttgaggccaagcagcagtacattctacacgtagcagtgacgaatgtggtaccttttgaggtctctctcaccacctccacagccaccgtcaccgtggatgtgctggatgtgaatgaaggccccatctttgtgcctcctgaaaagagagtggaagtgtccgaggactttggcgtgggccaggaaatcacatcctacactgcccaggagccagacacatttatggaacagaaaataacatatcggatttggagagacactcgcaactggctggagattaatccggacactggtgccatttccactcgggctgagctggacagggaggattttgagcacgtgaagaacagcacgtacacagccctaatcatagctacagacaatggttctccagttgctactggaacagggacacttctgctgatcctgtctgatgtgaatgacaacgcccccataccagaacctcgaactatattcttctgtgagaggaatccaaagcctcaggtcataaacattcatgatgcagaccttcctcccaatacatctcccttcacagcagaactaacacacgggcgagtgcccaactggaccattcagtacaacgacccaacccaagaatctatcattttgaagccaaagatggccttagaggtgggtgactacaaaatcaatctcaagctcatggataaccagaataaagaccaagtgaccaccttagaggtcagcgtgtgtgactgtgaaggggccgccggcgtctgtaggaaggcacagcctgtcgaagcaggattgcaaattcctgccattctggggattcttggaggaattcttgctttgctaattctgattctgctgctcttgctgtttcttcggaggagagcggtggtcaaagagcccttactgcccccagaggatgacacccgggacaacgtttattactatgatgaagaaggaggcggagaagaggaccaggactttgacttgagccagctgcacaggggcctggacgctcggcctgaagtgactcgtaacgacgttgcaccaaccctcatgagtgtcccccggtatcttccccgccctgccaatcccgatgaaattggaaattttattgatgaaaatctgaaagcggctgatactgaccccacagccccgccttatgattctctgctcgtgtttgactatgaaggaagcggttccgaagctgctagtctgagctccctgaactcctcagagtcagacaaagaccaggactatgactacttgaacgaatggggcaatccgttcaagaagctggctgacatgtacggaggcggcgaggaccactaggggactcgagagaggcggcccagaccatgtgcagaaatgcagaaatcagcgttctggtgtttt

SEQ ID NO: 4 - DNA, 1478 bp, Homo sapiens
gtgagacagcagtgaagccgccggcacctccgctgccgcagatgatggaagggaacgggaacggccatgagcactgcagcgattgcgagaatgaggaggacaacagctacaaccggggtggtttgagtccagccaatgacactggagccaaaaagaagaaaaagaaacaaaaaaagaagaaagaaaaaggcagtgagacagattcagcccaggatcagcctgtgaagatgaactctttgccagcagagaggatccaggaaatacagaaggccattgagctgttctcagtgggtcagggacctgccaaaaccatggaggaggctagcaagcgaagctaccagttctgggatacgcagcccgtccccaagctgggcgaagtggtgaacacccatggccccgtggagcctgacaaggacaatatccgccaggagccctacaccctgccccagggcttcacctgggatgctttggacttgggcgatcgtggtgtgctaaaagaactgtacaccctcctgaatgagaactatgtggaagatgatgacaacatgttccgatttgattattccccggagtttcttttgtgggctctccggccacccggctggctcccccagtggcactgtggggttcgagtggtctcaagtcggaaattggttgggttcattagcgccatcccagcaaacatccatatctatgacacagagaagaagatggtagagatcaacttcctgtgtgtccacaagaagctgcgttccaagagggttgctccagttctgatccgagagatcaccaggcgggttcacctggagggcatcttccaagcagtttacactgccggggtggtactaccaaagcccgttggcacctgcaggtattggcatcggtccctaaacccacggaagctgattgaagtgaagttctcccacctgagcagaaatatgaccatgcagcgcaccatgaagctctaccgactgccagagactcccaagacagctgggctgcgaccaatggaaacaaaggacattccagtagtgcaccagctcctcaccaggtacttgaagcaatttcaccttacgcccgtcatgagccaggaggaggtggagcactggttctacccccaggagaatatcatcgacactttcgtggtggagaacgcaaacggagaggtgacagatttcctgagcttttatacgctgccctccaccatcatgaaccatccaacccacaagagtctcaaagctgcttattctttctacaacgttcacacccagacccctcttctagacctcatgagcgacgcccttgtcctcgccaaaatgaaagggtttgatgtgttcaatgcactggatctcatggagaacaaaaccttcctggagaagctcaagtttggcataggggacggcaacctgcagtattacctttacaattggaaatgccccagcatgggggcagagaaggttggactggtgctacaataa

SEQ ID NO: 5 - DNA, 1846 bp, Homo sapiens
aaaagtgcctttgttggcctgggctcaggaatccagagaaactggtcaggaggaggccccagtgacaaaaacccctccctctgcccccgcccctctgccagagccatataactgctcaacctgtccccgagagagagtgccctggcagctgtcggctggaaggaactggtctgctcacacttgctggcttgcgcatcaggactggctttatctcctgactcacggtgcaaaggtgcactctgcgaacgttaagtccgtccccagcgcttggaatcctacggcccccacagccggatcccctcagccttccaggtcctcaactcccgtggacgctgaacaatggcctccatggggctacaggtaatgggcatcgcgctggccgtcctgggctggctggccgtcatgctgtgctgcgcgctgcccatgtggcgcgtgacggccttcatcggcagcaacattgtcacctcgcagaccatctgggagggcctatggatgaactgcgtggtgcagagcaccggccagatgcagtgcaaggtgtacgactcgctgctggcactgccgcaggacctgcaggcggcccgcgccctcgtcatcatcagcatcatcgtggctgctctgggcgtgctgctgtccgtggtggggggcaagtgtaccaactgcctggaggatgaaagcgccaaggccaagaccatgatcgtggcgggcgtggtgttcctgttggccggccttatggtgatagtgccggtgtcctggacggcccacaacatcatccaagacttctacaatccgctggtggcctccgggcagaagcgggagatgggtgcctcgctctacgtcggctgggccgcctccggcctgctgctccttggcggggggctgctttgctgcaactgtccaccccgcacagacaagccttactccgccaagtattctgctgcccgctctgctgctgccagcaactacgtgtaaggtgccacggctccactctgttcctctctgctttgttcttccctggactgagctcagcgcaggctgtgaccccaggagggccctgccacgggccactggctgctggggactggggactgggcagagactgagccaggcaggaaggcagcagccttcagcctctctggcccactcggacaacttcccaaggccgcctcctgctagcaagaacagagtccaccctcctctggatattggggagggacggaagtgacagggtgtggtggtggagtggggagctggcttctgctggccaggatagcttaaccctgactttgggatctgcctgcatcggcgttggccactgtccccatttacattttccccactctgtctgcctgcatctcctctgttccgggtaggccttgatatcacctctgggactgtgccttgctcaccgaaacccgcgcccaggagtatggctgaggccttgcccacccacctgcctgggaagtgcagagtggatggacgggtttagaggggaggggcgaaggtgctgtaaacaggtttgggcagtggtgggggagggggccagagaggcggctcaggttgcccagctctgtggcctcaggactctctgcctcacccgcttcagcccagggcccctggagactgatcccctctgagtcctctgccccttccaaggacactaatgagcctgggagggtggcagggaggaggggacagcttcacccttggaagtcctggggtttttcctcttccttctttgtggtttctgttttgtaatttaagaagagctattcatcactgtaattattattattttctacaataaatgggacctgtgcacaggaaaaaaaaaaaaaaaaaaaaaaaa

SEQ ID NO: 6 - DNA, 585 bp, Homo sapiens
  misc_feature (1)..(585): n = a,c,t, or g
ttccttgggcttctccttctccttgagcgcttcggcctcctccttctcctcctcagcctggccgctctctgactccgactcagactctgacacgctgccctcgtcaaagctgtcgtcaccactgtgcttccggttccgcttcttgctactctttttggcttccttctcggagtcttctttcttctcttccttgtccccatcaccctccgacttctttgttttgtcatcattagaactgtcattctcagcctgcttgccgtcttccttcttctcatccttgtcgttggttttgcgctccccgtcccctaggcctgctccagcccgtccttcttctttcttgctgggctccccaggctttcctgcctgctcctcctcctcctcctgctccaggatgcgaagatcattctccgtgcctccttccatcttaatcacggctgcatccagcatcttgacaatggcatcagctntgtctatgtccaggagaaggttatcaaaccagccagtctccatgagggacaggaagaccctcagtcgggtttgcagggccccccgggcctnctgccgacgcttccccacctcatctgg

SEQ ID NO: 7 - DNA, 2982 bp, Homo sapiens
gcctcggaggcgtgggtgacgcaggcgcagcgcgggctgcgcgcgctactgcccatccccggttgtcccacttttgttcgcctctcttcggccctctactcaagagctccgtctccgtctcgccctcctcgaagtcctcgtcgcgcgcccgcgacccaggtcgccctgaaatctagcccgtccgagcgcgagtccaacgccgcggccgcaccaaggccccctcagaccgtgccatgggtgacagtgatgacgagtacgatcgaaggcgcagggacaagttcagaagagagcgcagcgactacgaccgttcccgcgagagagatgaaagacgtcgaggggacgattggaatgacagagagtgggaccgtggccgtgagcgccgtagtcggggtgaatatcgggactatgaccggaatcggcgagagcgcttctcgccacctcgccacgaactcagcccgccacagaagcgcatgaggagagactgggatgagcacagctctgacccataccacagtggctatgagatgccctatgctggggggggtgggggcccaacttatggcccccctcagccctggggccaccctgacgtccacatcatgcagcaccatgtcctgcctatccaggccaggctgggcagcattgcagagattgacctgggtgtgccgccgcccgtgatgaagaccttcaaggagtttctcctctccctggatgactcggtggatgagacggaggccgtcaagcgctataatgactacaagctggatttccggaggcaacagatgcaggatttcttcctggcgcacaaagatgaggagtggtttcggtctaagtaccacccagatgaggtggggaagcgtcggcaggaggcccggggggccctgcaaaaccgactgagggtcttcctgtccctcatggagactggctggtttgataaccttctcctggacatagacaaagctgatgccattgtcaagatgctggatgcagccgtgattaagatggaaggaggcacggagaatgatcttcgcatcctggagcaggaggaggaggaggagcaggcaggaaagcctggggagcccagcaagaaagaagaaggacgggctggagcaggcctaggggacggggagcgcaaaaccaacgacaaggatgagaagaaggaagacggcaagcaggctgagaatgacagttctaatgatgacaaaacaaagaagtcggagggtgatggggacaaggaagagaagaaagaagactccgagaaggaagccaaaaagagtagcaagaagcggaaccggaagcacagtggtgacgacagctttgacgagggcagcgtgtcagagtctgagtcggagtcagagagcggccaggctgaggaggagaaggaggaggccgaagcgctcaaggagaaggagaagcccaaggaagaagaatgggagaagcccaaggacgccgcggggctggagtgcaagccgcggccgctgcataagacctgctccctcttcatgcgcaacatcgcgcccaacatctcccgggccgagatcatctccctttgtaaaaggtacccaggctttatgcgggtggcgctctcagagccccagccagagaggaggtttttccgtcgtggctgggtgaccttcgaccgcagtgttaacattaaagagatctgttggaacctgcagaacatccgtctccgggagtgtgagctgagccctggtgtgaacagggacctgacccggcgcgttcgcaacatcaacggcatcacccagcacaagcagattgtgcgcaacgacatcaagctggcggccaagctgatccacacgctggatgacaggacacagctttgggcctcagaaccagggacgcctcccctgcccacgagcctgccctcgcaaaacccgatcttgaagaatatcaccgactacctgatcgaggaagtaagcgccgaggaggaggagctgctggggagcagcgggggcgctcctcctgaggagcctcctaaggaagggaacccggcagagatcaacgtggagcgggatgagaagttgattaaggtcttggacaagctcctcctttacctgcgcatcgtgcattccttggattattacaacacctgtgagtaccccaacgaggacgagatgcccaatcgctgtgggatcatccacgttcgggggcccatgccacccaaccgcatcagtcacggggaagtgctggagtggcagaagacttttgaggagaagctcacgccgttgctgagtgtgcgggagtcactctcagaggaagaggcccagaagatggggcgcaaagacccagagcaggaagtggagaagttcgtcacctccaacacgcaggaactgggcaaggataagtggctgtgtcctctcagtggcaagaaattcaagggtcctgagtttgtgcgcaaacatatcttcaacaagcatgcagagaaaattgaggaagtgaaaaaggaagtcgcgttttttaacaacttcctcactgatgctaagcgcccagctctgcctgagatcaagccagcccagccacctggccccgcccagatactccccccaggtttgaccccaggactcccctacccacaccagactccccagggcctgatgccctatggtcagccccggcccccgatcttgggctatggagctggtgctgtccgccctgcagtccccacaggaggccctccatacccccatgccccgtatggtgctggtcgagggaactatgatgccttccgaggccagggaggttatcctgggaaacctcgcaacaggatggttcgtggagacccaagggccattgtggaatatcgggacctggatgccccagacgatgttgatttcttttgagccgtcccccgttcctcagtcctgtatcatccatacttgtactaccttgtcctatgaagctctgagaattttttgtacgatcagccttactgctaataaaagcacttccacagggaaaaaa

SEQ ID NO: 8 - DNA, 447 bp, Homo sapiens
ccaaaaatactccaggctctttctcttataagtcatttttttttctcctgtaaaaagcccccctgccctgccttcttacataaagcacttactacgcgccaaagtgcccttgagacctaagatctgaagcaactatgagaaaggtacagagggagagagagagagaaagagagcacgccagtgagaaagcgagcgcgagcgcgagcgcaaggggaggagagggtgggagagggcggaagggggaaagctgtccgtgggagattgtgtcttcatgtccacggggctgcatctcttgatggtgcactgaaaaagcagagctcaccagacagagtggaaaggcagggggaggggcagggagcaacagaaggaagagacaacaagcccaagacagcttccatctcagacggaaggcccccagaagatagaattccagccgactgaaaaacc

SEQ ID NO: 9 - DNA, 539 bp, Homo sapiens
cctaacaattccgacatggttcacattcatcaagactaaagccatccctcgggagagaccctggctaccgacattcatgtgaagattgtctagtgaattgcttgcgacacatcccaccatcgccatcccacagttgttactggtttgtcaagcataagccatgccctaacgacaggctggcctttgacagcagatgttctacagagatgagtgcatttttatttgggtggggtagagatggtgtcttttggaccccaacaaactgtactctaaacttcacagagtccttgggacgggaaatcatcacctcatccagggacactggctatcttcaaagatgggtgcggcgactccacatcactgtgaccttctttgctaagtgtttcggaaacagaacacgaataaaatactcatctcagaaccagagcactttttggtcttctgggacatgaataattcacatacccaagtggaggccaatcaatgatctgagaatgatcaacgcaccctggcttttgcaggtggtcctggcacgttcc

SEQ ID NO: 10 - DNA, 3504 bp, Homo sapiens
ctcccacggtctctagttcgcgttatggccgctgccgcggctgtggaggcggcggcgcctatgggtgccctatggggcctcgtgcacgacttcgtcgtgggtcagcaagagggccccgctgaccaggtggctgcagatgtgaaatctggcaactatacagtgttacaagttgtggaagcccttgggtcctctctagagaatccagaaccccgaactcgggcacgaggaatccagcttttgtcacaggtgctactccactgtcacaccttgctcctggagaaggaagtggtacacctgatactgttctatgagaaccggctgaaggaccatcatcttgtgatcccatctgtcctgcagggtttgaaggcacttagcctgtgtgtggccctgcccccagggctggctgtttctgtgcttaaagccatcttccaggaagtgcatgtacagtccctgccacaggtggaccgacacacagtctacaatatcatcaccaattttatgcgaacccgggaagaagagctaaagagcctaggagctgacttcacctttggcttcatccatgtgatggatggggaaaaggatccccgtaatcttctggtggccttccgcatcgtccatgacctcatctccagggactatagcctgggaccctttgtggaggagttgtttgaagtgacatcctgttatttccctatcgattttacccctccacctaatgatccccatggtatccagagagaagacctcatcctgagtcttcgcgctgtgctggcttctacaccacgatttgctgagtttctgctgcccctgttgattgagaaagtggattctgaggttctgagtgccaagttggattctctacagactctgaatgcttgctgtgctgtgtatggacagaaggaactgaaggacttcctccccagcctttgggcttctatccgcagagaggtgttccagacggcaagtgagcgggtggaggcagagggcctggcggccctccactccctgactgcgtgtttgtctcgctctgtgctgagggctgatgctgaggacctccttgactccttccttagcaacattctacaggactgcagacaccacctgtgtgaaccggacatgaaactggtgtggcctagtgccaagctgttgcaggcagctgcaggtgcatctgcccgggcctgtgactctgacaccagcaatgtaccgcctttactgctggaacagttccacaagcacagtcagagcagccagcggcggacaatccttgaaatgctcctgggtttcttgaagctgcagcagaaatggagctatgaagacaaagatcaaaggcctctgaatggcttcaaggaccagctgtgctcactggtattcatggctctaacagaccccagcacccagcttcagcttgttggcatccgtacactgacagtcttgggtgcccagccagatctcctatcttatgaggacttggagctggcagtgggtcacctgtacagactgagcttcctgaaggaggattcccagagttgcagggtggcagcactggaagcatcaggaaccctggctgctctctaccctgtggccttcagcagccacctcgtacccaagctcgctgaggagctgcgtgtaggggagtcaaatttgactaacggagatgagcccacccaatgctcccggcatctgtgctgtctgcaagccttgtcagctgtatcaacacatcccagcatcgtcaaggagacactgcctctgctgctgcagcatctctggcaagtgaacagagggaatatggttgcacaatccagtgacgttattgctgtctgtcagagcctcagacagatggcagaaaaatgtcagcaggaccctgagagttgctggtatttccaccagacagctataccttgcctgcttgccttggctgtgcaggcctctatgccagagaaggagccctcagttctgagaaaagtactattggaggatgaggtgttggctgccatggtgtctgtcattggcactgctacaacccacctgagccctgagttagctgcccagagtgtgacacacattgtgcccctcttcttggatggcaacgtgtcctttctgcctgaaaacagcttcccgagcagattccagccattccaggatggctcctcagggcagaggcggctgattgcactgcttatggcctttgtctgctccctgcctcgaaatgtggaaatccctcagctgaaccaactcatgcgggagtttttggaactgagctgctgccacagctgccccttttcttccaccgctgctgccaagtgctttgcaggactcctcaacaagcaccctgcagggcagcagctggatgaattcctacagctagctgtggacaaagtggaggctggcctgggctctgggccttgtcgtagtcaggccttcactcttcttctctgggtaacaaaggccctagtgctcagataccatcctctcagctcctgccttacagcccggctcatgggcctcctgagtgacccagaattaggtccagcagcagctgatggcttctctctgctcatgtctgactgcactgatgtgctgactcgtgctggccatgccgaagtgcggatcatgttccgccagcggttcttcacagataatgtgcctgctttggtccagggcttccatgctgctccccaagatgtgaagccaaactacttgaagggtctttctcatgtacttaacaggctgcccaagcctgtactcttgccagagctgcccacgcttctttccttgctgctggaggccctgtcctgccctgactgtgtggtgcagctctccaccctcagctgccttcagcctcttctactggaagcaccccaagtcatgagtcttcacgtggacaccctcgtcaccaagtttctgaacctcagctctagcccttccatggctgtccggatcgccgcactgcagtgcatgcatgctctcactcgcctgcccacccctgtgctgctgccgtacaaaccacaggtgattcgggccttagccaaacccctggatgacaagaagagactggtgcgcaaggaagcagtgtcagccagaggggagtggtttctgttggggagccctggcagctgagccctcagtcctggcctagactgttctgacaatctaacctgggattactaactgttgagccatcttccccaaagcagggaaaccactggtctctgactgcctttcccacagacacagcacaaatgctaggcctctgttgcatggctgtacaaagaacataagagtccatatttctagtggatttgtaaaataagtgtgtgtgagacacttgcgtttgaagaaagatctagggtcctgggtctcttgcatttatatgtcagaaaaggggcgatatgctgctgaggggtgagtgcatatgagtgtggccctgaggaccagggctggcagatgttgtctacctgctgaagaataaagatttcttttggtaaaaaaaaaaaaaaaaaaaaa

SEQ ID NO: 11 - DNA, 1700 bp, Homo sapiens
ggcggcggcagcgggttcggttgcgcgtggcgcacggggtgggagcggagcccaggccgggagcaggcgccgccgccagcgaccatggggaacgtgttggctgccagctcgccgcccgcagggccgccaccgccgcctgcgccggccctcgtggggctgccgccacctccgccctcgccgccgggcttcacgctgccgccgctgggaggcagcctgggcgccggcaccagtacgagtcgaagttcggaacggacccccggggctgcaaccgccagcgcctcaggggccgccgaggatggggcctgcggctgcctgcccaacccgggcacattcgaggagtgccaccggaagtgcaaggagctgtttcccattcagatggagggtgtcaagctcacagtcaacaaagggttgagtaaccattttcaggtcaaccacacagtagccctcagcacaatcggggagtccaactaccacttcggggtcacatatgtggggacaaagcagctgagtcccacagaggcgttccctgtactggtgggtgacatggacaacagtggcagtctcaacgctcaggtcattcaccagctgggccccggtctcaggtccaagatggccatccagacccagcagtcgaagtttgtgaactggcaggtggacggggagtatcggggctctgacttcacagcagccgtcaccctggggaacccagacgtcctcgtgggttcaggaatcctcgtagcccactacctccagagcatcacgccttgcctggccctgggtggagagctggtctaccaccggcggcctggagaggagggcactgtcatgtctctagctgggaaatacacattgaacaactggttggcaacggtaacgttgggccaggcgggcatgcacgcaacatactaccacaaagccagtgaccagctgcaggtgggtgtggagtttgaggccagcacaaggatgcaggacaccagcgtctccttcgggtaccagctggacctgcccaaggccaacctcctcttcaaaggctctgtggatagcaactggatcgtgggtgccacgctggagaagaagctcccacccctgcccctgacactggcccttggggccttcctgaatcaccgcaagaacaagtttcagtgtggctttggcctcaccatcggctgagccctcctggcccccgccttccacgcccttccgattccacctccacctccacctccccctgccacagaggggagacctgagcccccctcccttccctccccccttgggggtcggggggggacattggaaaggagggaccccgccaccccagcagctgaggaggggattctggaactgaatggcgcttcgggattctgagtagcaggggcagcatgcccagtgggcctggggtcccgggagggattccggaattgaggggcacgcaggattctgagcaccaggggcagaggcggccagacaacctcagggaggagtgtcctggcgtccccatcctccaaagggcctgggcccgccccgagggggcagcgagaggagcttccccatccccggtcagtccaccctgccccgtccactttcccatctcctcggtataaatcatgtttataagttatggaagaaccgggacattttacagaaaaaaaacaaaaaacaacaaaaaatatacgtgggaaaaaaaaaaaaaaaaaaaa

SEQ ID NO: 12 - DNA, 2259 bp, Homo sapiens
gttctccccttcccggctttcggtccggaggaggcgggagcagcttccctgttctgatcctatcgcgggcggcgcagggccggcttggccttccgtgggacggggaggggggcgggatgtgtcacccaaataccagtggggacggtcggtggtggaaccagccgggcaggtcgggtagagtataagagccggagggagcggccgggcggcagacgcctgcagaccatcccagacgccggagcccgagccccgccgagtccccgcgcctcatccgcccgcgtccggtccgcgttcctccgccccaccatggctcggggccccggcctcgcgccgccaccgctgcggctgccgctgctgctgctggtgctggcggcggtgaccggccacacggccgcgcaggacaactgcacgtgtcccaccaacaagatgaccgtgtgcagccccgacggccccggcggccgctgccagtgccgcgcgctgggctcgggcatggcggtcgactgctccacgctgacctccaagtgtctgctgctcaaggcgcgcatgagcgcccccaagaacgcccgcacgctggtgcggccgagtgagcacgcgctcgtggacaacgatggcctctacgaccccgactgcgaccccgagggccgcttcaaggcgcgccagtgcaaccagacgtcggtgtgctggtgcgtgaactcggtgggcgtgcgccgcacggacaagggcgacctgagcctacgctgcgatgacctggtgcgcacccaccacatcctcattgacctgcgccaccgccccaccgccggcgccttcaaccactcagacctggacgccgagctgaggcggctcttccgcgagcgctatcggctgcaccccaagttcgtggcggccgtgcactacgagcagcccaccatccagatcgagctgcggcagaacacgtctcagaaggccgccggtgaagtggatatcggcgatgccgcctactacttcgagagggacatcaagggcgagtctctattccagggccgcggcggcctggacttgcgcgtgcgcggagaacccctgcaggtggagcgcacgctcatctattacctggacgagattcccccgaagttctccatgaagcgcctcaccgccggcctcatcgccgtcatcgtggtggtcgtggtggccctcgtcgccggcatggccgtcctggtgatcaccaaccggagaaagtcggggaagtacaagaaggtggagatcaaggaactgggggagttgagaaaggaaccgagcttgtaggtacccggcggggcaggggatggggtggggtaccggatttcggtatcgtcccagacccaagtgagtcacgcttcctgattcctcggcgcaaaggagacgtttatcctttcaaattcctgccttccccctcccttttgcgcacacaccaggtttaatagatcctggcctcagggtctcctttctttctcacttctgtcttgaaggaagcatttctaaaatgtatcccctttcggtccaacaacaggaaacctgactggggcagtgaaggaagggatggcacagcgttatgtgtaaaaaacaagtatctgtatgacaacccgggatcgtttgcaagtaactgaatccattgcgacattgtgaaggcttaaatgagtttagatgggaaatagcgttgttatcgccttgggtttaaattatttgatgagttccacttgtatcatggcctacccgaggagaagaggagtttgttaactgggcctatgtagtagcctcatttaccatcgtttgtattactgaccacatatgcttgtcactgggaaagaagcctgtttcagctgcctgaacgcagtttggatgtctttgaggacagacattgcccggaaactcagtctatttattcttcagcttgcccttactaccactgatattggtaatgttcttttttgtaaaatgtttgtacatatgttgtctttgataatgttgctgtaattttttaaaataaaacacgaatttaataaaatatgggaaaggcacaaaccagaagttggcatttgtgaaaagtccctccagatttctatcactttggtctctaatttcccaagacttgtattttttttttatttcaaattataacacttttttttcccccagaagtgggtgtttcatgttgctactctggtgtgtcccaagatatcctaactggccagtgtaaatgctattctttctaaataagattatttggaaacttccttcaaactgcag

SEQ ID NO: 13 - DNA, 14135 bp, Homo sapiens
gcactgcagcgccagcgtccgagcgggcggccgagctcccggagcggcctggccccgagccccgagcgggcgtcgctcagcagcaggtcgcggccgcagccccatccagccccgcgcccgccatgccgtccgcgggccccgcctgagctgcggcctccgcgcgcgggcgggcctggggacggcggggccatgcgcgcgctgccctaacgatgccgcccgccgcgcccgcccgcctggcgctggccctgggcctgggcctgtggctcggggcgctggcggggggccccgggcgcggctgcgggccctgcgagcccccctgcctctgcggcccagcgcccggcgccgcctgccgcgtcaactgctcgggccgcgggctgcggacgctcggtcccgcgctgcgcatccccgcggacgccacagcgctagacgtctcccacaacctgctccgggcgctggacgttgggctcctggcgaacctctcggcgctggcagagctggatataagcaacaacaagatttctacgttagaagaaggaatatttgctaatttatttaatttaagtgaaataaacctgagtgggaacccgtttgagtgtgactgtggcctggcgtggctgccgcgatgggcggaggagcagcaggtgcgggtggtgcagcccgaggcagccacgtgtgctgggcctggctccctggctggccagcctctgcttggcatccccttgctggacagtggctgtggtgaggagtatgtcgcctgcctccctgacaacagctcaggcaccgtggcagcagtgtccttttcagctgcccacgaaggcctgcttcagccagaggcctgcagcgccttctgcttctccaccggccagggcctcgcagccctctcggagcagggctggtgcctgtgtggggcggcccagccctccagtgcctcctttgcctgcctgtccctctgctccggccccccgccacctcctgcccccacctgtaggggccccaccctcctccagcacgtcttccctgcctccccaggggccaccctggtggggccccacggacctctggcctctggccagctagcagccttccacatcgctgccccgctccctgtcactgccacacgctgggacttcggagacggctccgccgaggtggatgccgctgggccggctgcctcgcatcgctatgtgctgcctgggcgctatcacgtgacggccgtgctggccctgggggccggctcagccctgctggggacagacgtgcaggtggaagcggcacctgccgccctggagctcgtgtgcccgtcctcggtgcagagtgacgagagcctcgacctcagcatccagaaccgcggtggttcaggcctggaggccgcctacagcatcgtggccctgggcgaggagccggcccgagcggtgcacccgctctgcccctcggacacggagatcttccctggcaacgggcactgctaccgcctggtggtggagaaggcggcctggctgcaggcgcaggagcagtgtcaggcctgggccggggccgccctggcaatggtggacagtcccgccgtgcagcgcttcctggtctcccgggtcaccaggtgcctagacgtgtggatcggcttctcgactgtgcagggggtggaggtgggcccagcgccgcagggcgaggccttcagcctggagagctgccagaactggctgcccggggagccacacccagccacagccgagcactgcgtccggctcgggcccaccgggtggtgtaacaccgacctgtgctcagcgccgcacagctacgtctgcgagctgcagcccggaggcccagtgcaggatgccgagaacctcctcgtgggagcgcccagtggggacctgcagggacccctgacgcctctggcacagcaggacggcctctcagccccgcacgagcccgtggaggtcatggtattcccgggcctgcgtctgagccgtgaagccttcctcaccacggccgaatttgggacccaggagctccggcggcccgcccagctgcggctgcaggtgtaccggctcctcagcacagcagggaccccggagaacggcagcgagcctgagagcaggtccccggacaacaggacccagctggcccccgcgtgcatgccagggggacgctggtgccctggagccaacatctgcttgccgctggacgcctcctgccacccccaggcctgcgccaatggctgcacgtcagggccagggctacccggggccccctatgcgctatggagagagttcctcttctccgttcccgcggggccccccgcgcagtactcggtcaccctccacggccaggatgtcctcatgctccctggtgacctcgttggcttgcagcacgacgctggccctggcgccctcctgcactgctcgccggctcccggccaccctggtccccgggccccgtacctctccgccaacgcctcgtcatggctgccccacttgccagcccagctggagggcacttgggcctgccctgcctgtgccctgcggctgcttgcagccacggaacagctcaccgtgctgctgggcttgaggcccaaccctggactgcggctgcctgggcgctatgaggtccgggcagaggtgggcaatggcgtgtccaggcacaacctctcctgcagctttgacgtggtctccccagtggctgggctgcgggtcatctaccctgccccccgcgacggccgcctctacgtgcccaccaacggctcagccttggtgctccaggtggactctggtgccaacgccacggccacggctcgctggcctgggggcagtgtcagcgcccgctttgagaatgtctgccctgccctggtggccaccttcgtgcccggctgcccctgggagaccaacgataccctgttctcagtggtagcactgccgtggctcagtgagggggagcacgtggtggacgtggtggtggaaaacagcgccagccgggccaacctcagcctgcgggtgacggcggaggagcccatctgtggcctccgcgccacgcccagccccgaggcccgtgtactgcagggagtcctagtgaggtacagccccgtggtggaggccggctcggacatggtcttccggtggaccatcaacgacaagcagtccctgaccttccagaacgtggtcttcaatgtcatttatcagagcgcggcggtcttcaagctctcactgacggcctccaaccacgtgagcaacgtcaccgtgaactacaacgtaaccgtggagcggatgaacaggatgcagggtctgcaggtctccacagtgccggccgtgctgtcccccaatgccacgctagcactgacggcgggcgtgctggtggactcggccgtggaggtggccttcctgtggacctttggggatggggagcaggccctccaccagttccagcctccgtacaacgagtccttcccggttccagacccctcggtggcccaggtgctggtggagcacaatgtcatgcacacctacgctgccccaggtgagtacctcctgaccgtgctggcatctaatgccttcgagaacctgacgcagcaggtgcctgtgagcgtgcgcgcctccctgccctccgtggctgtgggtgtgagtgacggcgtcctggtggccggccggcccgtcaccttctacccgcacccgctgccctcgcctgggggtgttctttacacgtgggacttcggggacggctcccctgtcctgacccagagccagccggctgccaaccacacctatgcctcgaggggcacctaccacgtgcgcctggaggtcaacaacacggtgagcggtgcggcggcccaggcggatgtgcgcgtctttgaggagctccgcggactcagcgtggacatgagcctggccgtggagcagggcgcccccgtggtggtcagcgccgcggtgcagacgggcgacaacatcacgtggaccttcgacatgggggacggcaccgtgctgtcgggcccggaggcaacagtggagcatgtgtacctgcgggcacagaactgcacagtgaccgtgggtgcggccagccccgccggccacctggcccggagcctgcacgtgctggtcttcgtcctggaggtgctgcgcgttgaacccgccgcctgcatccccacgcagcctgacgcgcggctcacggcctacgtcaccgggaacccggcccactacctcttcgactggaccttcggggatggctcctccaacacgaccgtgcgggggtgcccgacggtgacacacaacttcacgcggagcggcacgttccccctggcgctggtgctgtccagccgcgtgaacagggcgcattacttcaccagcatctgcgtggagccagaggtgggcaacgtcaccctgcagccagagaggcagtttgtgcagctcggggacgaggcctggctggtggcatgtgcctggcccccgttcccctaccgctacacctgggactttggcaccgaggaagccgcccccacccgtgccaggggccctgaggtgacgttcatctaccgagacccaggctcctatcttgtgacagtcaccgcgtccaacaacatctctgctgccaatgactcagccctggtggaggtgcaggagcccgtgctggtcaccagcatcaaggtcaatggctcccttgggctggagctgcagcagccgtacctgttctctgctgtgggccgtgggcgccccgccagctacctgtgggatctgggggacggtgggtggctcgagggtccggaggtcacccacgcttacaacagcacaggtgacttcaccgttagggtggccggctggaatgaggtgagccgcagcgaggcctggctcaatgtgacggtgaagcggcgcgtgcgggggctcgtcgtcaatgcaagccgcacggtggtgcccctgaatgggagcgtgagcttcagcacgtcgctggaggccggcagtgatgtgcgctattcctgggtgctctgtgaccgctgcacgcccatccctgggggtcctaccatctcttacaccttccgctccgtgggcaccttcaatatcatcgtcacggctgagaacgaggtgggctccgcccaggacagcatcttcgtctatgtcctgcagctcatagaggggctgcaggtggtgggcggtggccgctacttccccaccaaccacacggtacagctgcaggccgtggttagggatggcaccaacgtctcctacagctggactgcctggagggacaggggcccggccctggccggcagcggcaaaggcttctcgctcaccgtgctcgaggccggcacctaccatgtgcagctgcgggccaccaacatgctgggcagcgcctgggccgactgcaccatggacttcgtggagcctgtggggtggctgatggtggccgcctccccgaacccagctgccgtcaacacaagcgtcaccctcagtgccgagctggctggtggcagtggtgtcgtatacacttggtccttggaggaggggctgagctgggagacctccgagccatttaccacccatagcttccccacacccggcctgcacttggtcaccatgacggcagggaacccgctgggctcagccaacgccaccgtggaagtggatgtgcaggtgcctgtgagtggcctcagcatcagggccagcgagcccggaggcagcttcgtggcggccgggtcctctgtgcccttttgggggcagctggccacgggcaccaatgtgagctggtgctgggctgtgcccggcggcagcagcaagcgtggccctcatgtcaccatggtcttcccggatgctggcaccttctccatccggctcaatgcctccaacgcagtcagctgggtctcagccacgtacaacctcacggcggaggagcccatcgtgggcctggtgctgtgggccagcagcaaggtggtggcgcccgggcagctggtccattttcagatcctgctggctgccggctcagctgtcaccttccgcctgcaggtcggcggggccaaccccgaggtgctccccgggccccgtttctcccacagcttcccccgcgtcggagaccacgtggtgagcgtgcggggcaaaaaccacgtgagctgggcccaggcgcaggtgcgcatcgtggtgctggaggccgtgagtgggctgcaggtgcccaactgctgcgagcctggcatcgccacgggcactgagaggaacttcacagcccgcgtgcagcgcggctctcgggtcgcctacgcctggtacttctcgctgcagaaggtccagggcgactcgctggtcatcctgtcgggccgcgacgtcacctacacgcccgtggccgcggggctgttggagatccaggtgcgcgccttcaacgccctgggcagtgagaaccgcacgctggtgctggaggttcaggacgccgtccagtatgtggccctgcagagcggcccctgcttcaccaaccgctcggcgcagtttgaggccgccaccagccccagcccccggcgtgtggcctaccactgggactttggggatgggtcgccagggcaggacacagatgagcccagggccgagcactcctacctgaggcctggggactaccgcgtgcaggtgaacgcctccaacctggtgagcttcttcgtggcgcaggccacggtgaccgtccaggtgctggcctgccgggagccggaggtggacgtggtcctgcccctgcaggtgctgatgcggcgatcacagcgcaactacttggaggcccacgttgacctgcgcgactgcgtcacctaccagactgagtaccgctgggaggtgtatcgcaccgccagctgccagcggccggggcgcccagcgcgtgtggccctgcccggcgtggacgtgagccggcctcggctggtgctgccgcggctggcgctgcctgtggggcactactgctttgtgtttgtcgtgtcatttggggacacgccactgacacagagcatccaggccaatgtgacggtggcccccgagcgcctggtgcccatcattgagggtggctcataccgcgtgtggtcagacacacgggacctggtgctggatgggagcgagtcctacgaccccaacctggaggacggcgaccagacgccgctcagtttccactgggcctgtgtggcttcgacacagagggaggctggcgggtgtgcgctgaactttgggccccgcgggagcagcacggtcaccattccacgggagcggctggcggctggcgtggagtacaccttcagcctgaccgtgtggaaggccggccgcaaggaggaggccaccaaccagacggtgctgatccggagtggccgggtgcccattgtgtccttggagtgtgtgtcctgcaaggcacaggccgtgtacgaagtgagccgcagctcctacgtgtacttggagggccgctgcctcaattgcagcagcggctccaagcgagggcggtgggctgcacgtacgttcagcaacaagacgctggtgctggatgagaccaccacatccacgggcagtgcaggcatgcgactggtgctgcggcggggcgtgctgcgggacggcgagggatacaccttcacgctcacggtgctgggccgctctggcgaggaggagggctgcgcctccatccgcctgtcccccaaccgcccgccgctggggggctcttgccgcctcttcccactgggcgctgtgcacgccctcaccaccaaggtgcacttcgaatgcacgggctggcatgacgcggaggatgctggcgccccgctggtgtacgccctgctgctgcggcgctgtcgccagggccactgcgaggagttctgtgtctacaagggcagcctctccagctacggagccgtgctgcccccgggtttcaggccacacttcgaggtgggcctggccgtggtggtgcaggaccagctgggagccgctgtggtcgccctcaacaggtctttggccatcaccctcccagagcccaacggcagcgcaacggggctcacagtctggctgcacgggctcaccgctagtgtgctcccagggctgctgcggcaggccgatccccagcacgtcatcgagtactcgttggccctggtcaccgtgctgaacgagtacgagcgggccctggacgtggcggcagagcccaagcacgagcggcagcaccgagcccagatacgcaagaacatcacggagactctggtgtccctgagggtccacactgtggatgacatccagcagatcgctgctgcgctggcccagtgcatggggcccagcagggagctcgtatgccgctcgtgcctgaagcagacgctgcacaagctggaggccatgatgctcatcctgcaggcagagaccaccgcgggcaccgtgacgcccaccgccatcggagacagcatcctcaacatcacaggagacctcatccacctggccagctcggacgtgcgggcaccacagccctcagagctgggagccgagtcaccatctcggatggtggcgtcccaggcctacaacctgacctctgccctcatgcgcatcctcatgcgctcccgcgtgctcaacgaggagcccctgacgctggcgggcgaggagatcgtggcccagggcaagcgctcggacccgcggagcctgctgtgctatggcggcgccccagggcctggctgccacttctccatccccgaggctttcagcggggccctggccaacctcagtgacgtggtgcagctcatctttctggtggactccaatccctttccctttggctatatcagcaactacaccgtctccaccaaggtggcctcgatggcattccagacacaggccggcgcccagatccccatcgagcggctggcctcagagcgcgccatcaccgtgaaggtgcccaacaactcggactgggctgcccggggccaccgcagctccgccaactccgccaactccgttgtggtccagccccaggcctccgtcggtgctgtggtcaccctggacagcagcaaccctgcggccgggctgcatctgcagctcaactatacgctgctggacggccactacctgtctgaggaacctgagccctacctggcagtctacctacactcggagccccggcccaatgagcacaactgctcggctagcaggaggatccgcccagagtcactccagggtgctgaccaccggccctacaccttcttcatttccccggggagcagagacccagcggggagttaccatctgaacctctccagccacttccgctggtcggcgctgcaggtgtccgtgggcctgtacacgtccctgtgccagtacttcagcgaggaggacatggtgtggcggacagaggggctgctgcccctggaggagacctcgccccgccaggccgtctgcctcacccgccacctcaccgccttcggcgccagcctcttcgtgcccccaagccatgtccgctttgtgtttcctgagccgacagcggatgtaaactacatcgtcatgctgacatgtgctgtgtgcctggtgacctacatggtcatggccgccatcctgcacaagctggaccagttggatgccagccggggccgcgccatccctttctgtgggcagcggggccgcttcaagtacgagatcctcgtcaagacaggctggggccggggctcaggtaccacggcccacgtgggcatcatgctgtatggggtggacagccggagcggccaccggcacctggacggcgacagagccttccaccgcaacagcctggacatcttccggatcgccaccccgcacagcctgggtagcgtgtggaagatccgagtgtggcacgacaacaaagggctcagccctgcctggttcctgcagcacgtcatcgtcagggacctgcagacggcacgcagcgccttcttcctggtcaatgactggctttcggtggagacggaggccaacgggggcctggtggagaaggaggtgctggccgcgagcgacgcagcccttttgcgcttccggcgcctgctggtggctgagctgcagcgtggcttctttgacaagcacatctggctctccatatgggaccggccgcctcgtagccgtttcactcgcatccagagggccacctgctgcgttctcctcatctgcctcttcctgggcgccaacgccgtgtggtacggggctgttggcgactctgcctacagcacggggcatgtgtccaggctgagcccgctgagcgtcgacacagtcgctgttggcctggtgtccagcgtggttgtctatcccgtctacctggccatcctttttctcttccggatgtcccggagcaaggtggctgggagcccgagccccacacctgccgggcagcaggtgctggacatcgacagctgcctggactcgtccgtgctggacagctccttcctcacgttctcaggcctccacgctgaggcctttgttggacagatgaagagtgacttgtttctggatgattctaagagtctggtgtgctggccctccggcgagggaacgctcagttggccggacctgctcagtgacccgtccattgtgggtagcaatctgcggcagctggcacggggccaggcgggccatgggctgggcccagaggaggacggcttctccctggccagcccctactcgcctgccaaatccttctcagcatcagatgaagacctgatccagcaggtccttgccgagggggtcagcagcccagcccctacccaagacacccacatggaaacggacctgctcagcagcctgtccagcactcctggggagaagacagagacgctggcgctgcagaggctgggggagctggggccacccagcccaggcctgaactgggaacagccccaggcagcgaggctgtccaggacaggactggtggagggtctgcggaagcgcctgctgccggcctggtgtgcctccctggcccacgggctcagcctgctcctggtggctgtggctgtggctgtctcagggtgggtgggtgcgagcttccccccgggcgtgagtgttgcgtggctcctgtccagcagcgccagcttcctggcctcattcctcggctgggagccactgaaggtcttgctggaagccctgtacttctcactggtggccaagcggctgcacccggatgaagatgacaccctggtagagagcccggctgtgacgcctgtgagcgcacgtgtgccccgcgtacggccaccccacggctttgcactcttcctggccaaggaagaagcccgcaaggtcaagaggctacatggcatgctgcggagcctcctggtgtacatgctttttctgctggtgaccctgctggccagctatggggatgcctcatgccatgggcacgcctaccgtctgcaaagcgccatcaagcaggagctgcacagccgggccttcctggccatcacgcggtctgaggagctctggccatggatggcccacgtgctgctgccctacgtccacgggaaccagtccagcccagagctggggcccccacggctgcggcaggtgcggctgcaggaagcactctacccagaccctcccggccccagggtccacacgtgctcggccgcaggaggcttcagcaccagcgattacgacgttggctgggagagtcctcacaatggctcggggacgtgggcctattcagcgccggatctgctgggggcatggtcctggggctcctgtgccgtgtatgacagcgggggctacgtgcaggagctgggcctgagcctggaggagagccgcgaccggctgcgcttcctgcagctgcacaactggctggacaacaggagccgcgctgtgttcctggagctcacgcgctacagcccggccgtggggctgcacgccgccgtcacgctgcgcctcgagttcccggcggccggccgcgccctggccgccctcagcgtccgcccctttgcgctgcgccgcctcagcgcgggcctctcgctgcctctgctcacctcggtgtgcctgctgctgttcgccgtgcacttcgccgtggccgaggcccgtacttggcacagggaagggcgctggcgcgtgctgcggctcggagcctgggcgcggtggctgctggtggcgctgacggcggccacggcactggtacgcctcgcccagctgggtgccgctgaccgccagtggacccgtttcgtgcgcggccgcccgcgccgcttcactagcttcgaccaggtggcgcagctgagctccgcagcccgtggcctggcggcctcgctgctcttcctgcttttggtcaaggctgcccagcagctacgcttcgtgcgccagtggtccgtctttggcaagacattatgccgagctctgccagagctcctgggggtcaccttgggcctggtggtgctcggggtagcctacgcccagctggccatcctgctcgtgtcttcctgtgtggactccctctggagcgtggcccaggccctgttggtgctgtgccctgggactgggctctctaccctgtgtcctgccgagtcctggcacctgtcacccctgctgtgtgtggggctctgggcactgcggctgtggggcgccctacggctgggggctgttattctccgctggcgctaccacgccttgcgtggagagctgtaccggccggcctgggagccccaggactacgagatggtggagttgttcctgcgcaggctgcgcctctggatgggcctcagcaaggtcaaggagttccgccacaaagtccgctttgaagggatggagccgctgccctctcgctcctccaggggctccaaggtatccccggatgtgcccccacccagcgctggctccgatgcctcgcacccctccacctcctccagccagctggatgggctgagcgtgagcctgggccggctggggacaaggtgtgagcctgagccctcccgcctccaagccgtgttcgaggccctgctcacccagtttgaccgactcaaccaggccacagaggacgtctaccagctggagcagcagctgcacagcctgcaaggccgcaggagcagccgggcgcccgccggatcttcccgtggcccatccccgggcctgcggccagcactgcccagccgccttgcccgggccagtcggggtgtggacctggccactggccccagcaggacaccccttcgggccaagaacaaggtccaccccagcagcacttagtcctccttcctggcgggggtgggccgtggagtcggagtggacaccgctcagtattactttctgccgctgtcaaggccgagggccaggcagaatggctgcacgtaggttccccagagagcaggcaggggcatctgtctgtctgtgggcttcagcactttaaagaggctgtgtggccaaccaggacccagggtcccctccccagctcccttgggaaggacacagcagtattggacggtttctagcctctgagatgctaatttatttccccgagtcctcaggtacagcgggctgtgcccggccccaccccctgggcagatgtcccccactgctaaggctgctggcttcagggagggttagcctgcaccgccgccaccctgcccctaagttattacctctccagttcctaccgtactccctgcaccgtctcactgtgtgtctcgtgtcagtaatttatatggtgttaaaatgtgtatatttttgtatgtcactattttcactagggctgaggggcctgcgcccagagctggcctcccccaacacctgctgcgcttggtaggtgtggtggcgttatggcagcccggctgctgcttggatgcgagcttggccttgggccggtgctgggggcacagctgtctgccaggcactctcatcaccccagaggccttgtcatcctcccttgccccaggccaggtagcaagagagcagcgcccaggcctgctggcatcaggtctgggcaagtagcaggactaggcatgtcagaggaccccagggtggttagaggaaaagactcctcctgggggctggctcccagggtggaggaaggtgactgtgtgtgtgtgtgtgtgcgcgcgcgcacgcgcgagtgtgctgtatggcccaggcagcctcaaggccctcggagctggctgtgcctgcttctgtgtaccacttctgtgggcatggccgcttctagagcctcgacacccccccaacccccgcaccaagcagacaaagtcaataaaagagctgtctgactgc

SEQ ID NO: 14 - DNA, 2699 bp, Homo sapiens
ggagcgcttaagaggagggtcgggctcggccggggagtcccagtggcggaggctacgaaacttgggggagtgcacagaagaacttcgggagcgcacgcgggaccagggaccaggctgagactcggggcgccagtccgggcaggggcagcgggagccggccgggtagggtgcagcctgaggcttgttcagcagaacaggtgcaagccacattgttgccaagacctgcctgaagccggattctccccactgcctccttcaaccccgcctcttcctcctcctgtgggactgctcccccctcctgtgaggctagatagatgccctgtatccaagcccaatatgggacaccagcaccgagtccgggaccccgtgaccacctggcaagcgaccccctgacccctgagttcatcaagcccaccatggacctggccagccccgaggcagcccccgctgcccccactgccctgcccagcttcagcaccttcatggacggctacacaggagagtttgacaccttcctctaccagctgccaggaacagtccagccatgctcctcagcctcctcctcggcctcctccacatcctcgtcctcagccacctcccctgcctctgcctccttcaagttcgaggacttccaggtgtacggctgctaccccggccccctgagcggcccagtggatgaggccctgtcctccagtggctctgactactatggcagcccctgctcggccccgtcgccctccacgcccagcttccagccgccccagctctctccctgggatggctccttcggccacttctcgcccagccagacttacgaaggcctgcgggcatggacagagcagctgcccaaagcctctgggcccccacagcctccagccttcttttccttcagtcctcccaccggccccagccccagcctggcccagagccccctgaagttgttcccctcacaggccacccaccagctgggggagggagagagctattccatgcctacggccttcccaggtttggcacccacttctccacaccttgagggctcggggatactggatacacccgtgacctcaaccaaggcccggagcggggccccaggtggaagtgaaggccgctgtgctgtgtgtggggacaacgcttcatgccagcattatggtgtccgcacatgtgagggctgcaagggcttcttcaagcgcacagtgcagaaaaacgccaagtacatctgcctggctaacaaggactgccctgtggacaagaggcggcgaaaccgctgccagttctgccgcttccagaagtgcctggcggtgggcatggtgaaggaagttgtccgaacagacagcctgaaggggcggcggggccggctaccttcaaaacccaagcagcccccagatgcctcccctgccaatctcctcacttccctggtccgtgcacacctggactcagggcccagcactgccaaactggactactccaagttccaggagctggtgctgccccactttgggaaggaagatgctggggatgtacagcagttctacgacctgctctccggttctctggaggtcatccgcaagtgggcggagaagatccctggctttgctgagctgtcaccggctgaccaggacctgttgctggagtcggccttcctggagctcttcatcctccgcctggcgtacaggtctaagccaggcgagggcaagctcatcttctgctcaggcctggtgctacaccggctgcagtgtgcccgtggcttcggggactggattgacagtatcctggccttctcaaggtccctgcacagcttgcttgtcgatgtccctgccttcgcctgcctctctgcccttgtcctcatcaccgaccggcatgggctgcaggagccgcggcgggtggaggagctgcagaaccgcatcgccagctgcctgaaggagcacgtggcagctgtggcgggcgagccccagccagccagctgcctgtcacgtctgttgggcaaactgcccgagctgcggaccctgtgcacccagggcctgcagcgcatcttctacctcaagctggaggacttggtgccccctccacccatcattgacaagatcttcatggacacgctgcccttctgacccctgcctgggaacacgtgtgcacatgcgcactctcatatgccaccccatgtgcctttagtccacggacccccagagcacccccaagcctgggcttgagctgcagaatgactccaccttctcacctgctccaggaggtttgcagggagctcaagcccttggggagggggatgccttcatgggggtgaccccacgatttgtcttatcccccccagcctggccccggcctttatgttttttgtaagataaaccgtttttaacacatagcgccgtgctgtaaataagcccagtgctgctgtaaatacaggaagaaagagcttgaggtgggagcggggctgggaggaagggatgggccccgccttcctgggcagcctttccagcctcctgctggctctctcttcctaccctccttccacatgtacataaactgtcactctaggaagaagacaaatgacagattctgacatttatatttgtgtattttcctggatttatagtatgtgacttttctgattaatatatttaatatattgaataaaaaatagacatgtagttggaaaaaaaaaaaaaaaaaaaaaaaaaaaaaaa

SEQ ID NO: 15 - DNA, 5511 bp, Homo sapiens
acacacacacacccctcccctgccatccctccccggactccggctccggctccgattgcaatttgcaacctccgctgccgtcgccgcagcagccaccaattcgccagcggttcaggtggctcttgcctcgatgtcctagcctaggggcccccgggccggacttggctgggctcccttcaccctctgcggagtcatgagggcgaacgacgctctgcaggtgctgggcttgcttttcagcctggcccggggctccgaggtgggcaactctcaggcagtgtgtcctgggactctgaatggcctgagtgtgaccggcgatgctgagaaccaataccagacactgtacaagctctacgagaggtgtgaggtggtgatggggaaccttgagattgtgctcacgggacacaatgccgacctctccttcctgcagtggattcgagaagtgacaggctatgtcctcgtggccatgaatgaattctctactctaccattgcccaacctccgcgtggtgcgagggacccaggtctacgatgggaagtttgccatcttcgtcatgttgaactataacaccaactccagccacgctctgcgccagctccgcttgactcagctcaccgagattctgtcagggggtgtttatattgagaagaacgataagctttgtcacatggacacaattgactggagggacatcgtgagggaccgagatgctgagatagtggtgaaggacaatggcagaagctgtcccccctgtcatgaggtttgcaaggggcgatgctggggtcctggatcagaagactgccagacattgaccaagaccatctgtgctcctcagtgtaatggtcactgctttgggcccaaccccaaccagtgctgccatgatgagtgtgccgggggctgctcaggccctcaggacacagactgctttgcctgccggcacttcaatgacagtggagcctgtgtacctcgctgtccacagcctcttgtctacaacaagctaactttccagctggaacccaatccccacaccaagtatcagtatggaggagtttgtgtagccagctgtccccataactttgtggtggatcaaacatcctgtgtcagggcctgtcctcctgacaagatggaagtagataaaaatgggctcaagatgtgtgagccttgtgggggactatgtcccaaagcctgtgagggaacaggctctgggagccgcttccagactgtggactcgagcaacattgatggatttgtgaactgcaccaagatcctgggcaacctggactttctgatcaccggcctcaatggagacccctggcacaagatccctgccctggacccagagaagctcaatgtcttccggacagtacgggagatcacaggttacctgaacatccagtcctggccgccccacatgcacaacttcagtgttttttccaatttgacaaccattggaggcagaagcctctacaaccggggcttctcattgttgatcatgaagaacttgaatgtcacatctctgggcttccgatccctgaaggaaattagtgctgggcgtatctatataagtgccaataggcagctctgctaccaccactctttgaactggaccaaggtgcttcgggggcctacggaagagcgactagacatcaagcataatcggccgcgcagagactgcgtggcagagggcaaagtgtgtgacccactgtgctcctctgggggatgctggggcccaggccctggtcagtgcttgtcctgtcgaaattatagccgaggaggtgtctgtgtgacccactgcaactttctgaatggggagcctcgagaatttgcccatgaggccgaatgcttctcctgccacccggaatgccaacccatggagggcactgccacatgcaatggctcgggctctgatacttgtgctcaatgtgcccattttcgagatgggccccactgtgtgagcagctgcccccatggagtcctaggtgccaagggcccaatctacaagtacccagatgttcagaatgaatgtcggccctgccatgagaactgcacccaggggtgtaaaggaccagagcttcaagactgtttaggacaaacactggtgctgatcggcaaaacccatctgacaatggctttgacagtgatagcaggattggtagtgattttcatgatgctgggcggcacttttctctactggcgtgggcgccggattcagaataaaagggctatgaggcgatacttggaacggggtgagagcatagagcctctggaccccagtgagaaggctaacaaagtcttggccagaatcttcaaagagacagagctaaggaagcttaaagtgcttggctcgggtgtctttggaactgtgcacaaaggagtgtggatccctgagggtgaatcaatcaagattccagtctgcattaaagtcattgaggacaagagtggacggcagagttttcaagctgtgacagatcatatgctggccattggcagcctggaccatgcccacattgtaaggctgctgggactatgcccagggtcatctctgcagcttgtcactcaatatttgcctctgggttctctgctggatcatgtgagacaacaccggggggcactggggccacagctgctgctcaactggggagtacaaattgccaagggaatgtactaccttgaggaacatggtatggtgcatagaaacctggctgcccgaaacgtgctactcaagtcacccagtcaggttcaggtggcagattttggtgtggctgacctgctgcctcctgatgataagcagctgctatacagtgaggccaagactccaattaagtggatggcccttgagagtatccactttgggaaatacacacaccagagtgatgtctggagctatggtgtgacagtttgggagttgatgaccttcggggcagagccctatgcagggctacgattggctgaagtaccagacctgctagagaagggggagcggttggcacagccccagatctgcacaattgatgtctacatggtgatggtcaagtgttggatgattgatgagaacattcgcccaacctttaaagaactagccaatgagttcaccaggatggcccgagacccaccacggtatctggtcataaagagagagagtgggcctggaatagcccctgggccagagccccatggtctgacaaacaagaagctagaggaagtagagctggagccagaactagacctagacctagacttggaagcagaggaggacaacctggcaaccaccacactgggctccgccctcagcctaccagttggaacacttaatcggccacgtgggagccagagccttttaagtccatcatctggatacatgcccatgaaccagggtaatcttggggagtcttgccaggagtctgcagtttctgggagcagtgaacggtgcccccgtccagtctctctacacccaatgccacggggatgcctggcatcagagtcatcagaggggcatgtaacaggctctgaggctgagctccaggagaaagtgtcaatgtgtaggagccggagcaggagccggagcccacggccacgcggagatagcgcctaccattcccagcgccacagtctgctgactcctgttaccccactctccccacccgggttagaggaagaggatgtcaacggttatgtcatgccagatacacacctcaaaggtactccctcctcccgggaaggcaccctttcttcagtgggtctcagttctgtcctgggtactgaagaagaagatgaagatgaggagtatgaatacatgaaccggaggagaaggcacagtccacctcatccccctaggccaagttcccttgaggagctgggttatgagtacatggatgtggggtcagacctcagtgcctctctgggcagcacacagagttgcccactccaccctgtacccatcatgcccactgcaggcacaactccagatgaagactatgaatatatgaatcggcaacgagatggaggtggtcctgggggtgattatgcagccatgggggcctgcccagcatctgagcaagggtatgaagagatgagagcttttcaggggcctggacatcaggccccccatgtccattatgcccgcctaaaaactctacgtagcttagaggctacagactctgcctttgataaccctgattactggcatagcaggcttttccccaaggctaatgcccagagaacgtaactcctgctccctgtggcactcagggagcatttaatggcagctagtgcctttagagggtaccgtcttctccctattccctctctctcccaggtcccagccccttttccccagtcccagacaattccattcaatctttggaggcttttaaacattttgacacaaaattcttatggtatgtagccagctgtgcactttcttctctttcccaaccccaggaaaggttttccttattttgtgtgctttcccagtcccattcctcagcttcttcacaggcactcctggagatatgaaggattactctccatatcccttcctctcaggctcttgactacttggaactaggctcttatgtgtgcctttgtttcccatcagactgtcaagaagaggaaagggaggaaacctagcagaggaaagtgtaattttggtttatgactcttaaccccctagaaagacagaagcttaaaatctgtgaagaaagaggttaggagtagatattgattactatcataattcagcacttaactatgagccaggcatcatactaaacttcacctacattatctcacttagtcctttatcatccttaaaacaattctgtgacatacatattatctcattttacacaaagggaagtcgggcatggtggctcatgcctgtaatctcagcactttgggaggctgaggcagaaggattacctgaggcaaggagtttgagaccagcttagccaacatagtaagacccccatctctttaaaaaaaaaaaaaaaaaaaaaaaaaaaactttagaactgggtgcagtggctcatgcctgtaatcccagccagcactttgggaggctgagatgggaagatcacttgagcccagaattagagataagcctatggaaacatagcaagacactgtctctacaggggaaaaaaaaaaaagaaactgagccttaaagagatgaaataaattaagcagtagatccaggatgcaaaatcctcccaattcctgtgcatgtgctcttattgtaaggtgccaagaaaaactgatttaagttacagcccttgtttaaggggcactgtttcttgtttttgcactgaatcaagtctaaccccaacagccacatcctcctatacctagacatctcatctcaggaagtggtggtgggggtagtcagaaggaaaaataactggacatctttgtgtaaaccataatccacatgtgccgtaaatgatcttcactccttatccgagggcaaattcacaaggatccccaagatccacttttagaagccattctcatcca

SEQ ID NO: 16 - DNA, 546 bp, Homo sapiens
gatttctcccggaacctctgctcagcctggtgaaccacacaggccagcgctctgacatgcagaaggtgaccctgggcctgcttgtgttcctggcaggctttcctgtcctggacgccaatgacctagaagataaaaacagtcctttctactatgactggcacagcctccaggttggcgggctcatctgcgctggggttctgtgcgccatgggcatcatcatcgtcatgagtgcaaaatgcaaatgcaagtttggccagaagtccggtcaccatccaggggagactccacctctcatcaccccaggctcagcccaaagctgatgaggacagaccagctgaaattgggtggaggaccgttctctgtccccaggtcctgtctctgcacagaaacttgaactccaggatggaattcttcctcctctgctgggactcctttgcatggcagggcctcatctcacctctcgcaagagggtctctttgttcaattttttttaatctaaaatgattgtgcctctccaaaaaaaaaaaaaaaaaaaaaaaaaaaaaa

SEQ ID NO: 17 - DNA, 1938 bp, Homo sapiens
gactttggtggcaagaggagctggcggagcccagccagtgggcggggccaggggaggggcgggcaggtaggtgcagccactcctgggaggaccctgcgtggccagacggtgctggtgactcgtccacactgctcgcttcggatactccaggcgtctcccgttgcggccgctccctgccttagaggccagccttggacacttgctgcccctttccagcccggattctgggatccttccctctgagccaacatctgggtcctgccttcgacaccaccccaaggcttcctaccttgcgtgcctggagtctgccccaggggcccttgtcctgggccatggcccagaagggggtcctggggcctgggcagctgggggctgtggccattctgctctatcttggattactccggtcggggacaggagcggaaggggcagaagctccctgcggtgtggccccccaagcacgcatcacaggtggcagcagtgcagtcgccggtcagtggccctggcaggtcagcatcacctatgaaggcgtccatgtgtgtggtggctctctcgtgtctgagcagtgggtgctgtcagctgctcactgcttccccagcgagcaccacaaggaagcctatgaggtcaagctgggggcccaccagctagactcctactccgaggacgccaaggtcagcaccctgaaggacatcatcccccaccccagctacctccaggagggctcccagggcgacattgcactcctccaactcagcagacccatcaccttctcccgctacatccggcccatctgcctccctgcagccaacgcctccttccccaacggcctccactgcactgtcactggctggggtcatgtggccccctcagtgagcctcctgacgcccaagccactgcagcaactcgaggtgcctctgatcagtcgtgagacgtgtaactgcctgtacaacatcgacgccaagcctgaggagccgcactttgtccaagaggacatggtgtgtgctggctatgtggaggggggcaaggacgcctgccagggtgactctgggggcccactctcctgccctgtggagggtctctggtacctgacgggcattgtgagctggggagatgcctgtggggcccgcaacaggcctggtgtgtacactctggcctccagctatgcctcctggatccaaagcaaggtgacagaactccagcctcgtgtggtgccccaaacccaggagtcccagcccgacagcaacctctgtggcagccacctggccttcagctctgccccagcccagggcttgctgaggcccatccttttcctgcctctgggcctggctctgggcctcctctccccatggctcagcgagcactgagctggccctacttccaggatggatgcatcacactcaaggacaggagcctggtccttccctgatggcctttggacccagggcctgacttgagccactccttccttcaggactctgcgggaggctggggccccatcttgatctttgagcccattcttctgggtgtgctttttgggaccatcactgagagtcaggagttttactgcctgtagcaatggccagagcctctggcccctcacccaccatggaccagcccattggccgagctcctggggagctcctgggacccttggctatgaaaatgagccctggctcccacctgtttctggaagactgctcccggcccgcctgcccagactgatgagcacatctctctgccctctccctgtgttctgggctggggccacctttgtgcagcttcgaggacaggaaaggccccaatcttgcccactggccgctgagcgcccccgagccctgactcctggactccggaggactgagcccccaccggaactgggctggcgcttggatctggggtgggagtaacagggcagaaatgattaaaatgtttgagcac

SEQ ID NO: 18 - DNA, 561 bp, Homo sapiens
  misc_feature (1)..(561): n = a,c,t, or g
agttcattcatttattccagcaacaaatatttgagaacacactgtgtcccagacactgttctaaggactggcagcgaagtccaagacaaacagtccctaccttcagcaagtttgcagtcaagcaggatgcggatgctgagcattacaagggaaatgattattctgagagaggaagtatggggtgctatgggaacatacaaccagggacctaattttatgggaaagggaccagcccagatccaacacttgctctcccagtttacctccagtaggttctttttaacttgaactaatcttgtttggtggggtacacagtgaggaaaaagaagagctagtgacaaaatctaactcccttctcagtcttaagcaaggtgaaggcaagggagtagaagatatcaagggagtgagtggtggtagccaccaaagggagatagcagactgaggncctaaaaaaagaaaggaaatctaaatctatcagcaggncngagaaagaatgcttaaggtgattanatgggatcctggatgncctttcccggattttaaaagaanccnaaccnggga

SEQ ID NO: 19 - DNA, 3891 bp, Homo sapiens
gcgcactctggggaaagcggagctgcaccccgccccgtattgctgctcagctcctcagctgtgcgtgcgagggacgtcgggggtggcgccgcagcagttgcccctggtaacgggggaggcagcaggaggaggaggaggaggagggactcggcgggaggatgggcttgctctcaattttgcgcaagttgaaaagtgcaccagaccaggaggtgagaatacttctcctgggcttggataatgctggcaagaccactcttctgaagcagcttgcatctgaagacatcagccacatcacacctacacagggtttcaacatcaaaagtgtacaatcacaaggttttaaactgaatgtatgggacattggtggacagaggaaaatcagaccatactggaagaattattttgaaaataccgatattcttatatatgtaatcgacagtgcagacagaaaaagatttgaagagacgggtcaggaactagcggaattactggaggaagaaaaactaagttgtgtgccagtgctcatctttgctaataagcaggatttgctcacagcagcccctgcctctgaaattgcagaaggactgaacctgcataccatccgcgaccgagtctggcagatccagtcttgctcagctctcacaggagagggcgttcaggatggcatgaactgggtctgcaaaaatgtcaatgcaaagaagaaataaaatctagacgaatggagatgcaggagctgcgggagccgaattcggtcctgaaaaacactaatttgctgctttctgaccaaatgtttttccatctgtgtacagctccagctgtttgaagagagggaacaacacggtttagaaagaatccccattccagcagtagatttaactgatctctgaggttcagtatcatttttcaaataaaggaattatattatttcctctgcataattgaaatagtattaaatgtctcaaagcacatgattagaaaatgagatcttttaaatgagcaagagattgcattgcagtttagacaattccagtgggcttttttttcctctcaaaaaaaaaaaaagaaaaagaaaaagaggaagaagcagctttgctgagttcatttatttactgacccgtcccttgcattccctccatggttttgaaaccacagacagtgtttgctggtgctgtcagtgatttttaccgtcactagcccagccaggcttcagtctgtccgacaggaagctgctgggtgggggtggggggagaaaaggcagataattaaaccatctcatcgtcttgcaggtcggagactacgtatgtaatcctcactctttggacagaaaaaaaaaaaaaagtctttcttgcagacaagtcactacagaaacataccccatcccacccacccctgcctctgccccagccagccacacagagaagcaaattcttatgacttttgactgtaatgacatctggaatgtaaggagaggtgggaggtttaattccagaaaaattacaaggtccttaaaaagctctcacatcgagggctcaggctagcgtaaacaggctttctccagctcagtggagcagtgagcagccgactctgagattagctggcttctccacggccgtcctatagacaggatttctaaagctcaaagaattctgtgtttaaacgatcacaataggccgctgctatcagattttagaaataaatgcagctttaccatgaacctgctccactgagaaaagccaggcagatcgatttttagatcaatttttacagtgctggcaacttggtggtgtgggatgctcctggatggagagggtttgctgctggggaggacatgggtgtgtgtgtgactgcaggggtcgtgtccaaggaatcaagagtcaccccagctgctgggctcctctgcctctctgcagcagaatgtccgtcctctgttgattgattggagaggaatagcagaacatttctcctgcccctcgttgcaaaacgagcttgtttccctgaacctcagaaatcctcagcttcaaacatggggaaacaggccagagcattgcccggctcctgaattaaactctgttctggtgcctgagctcaggggttttcagagaatgaataagagactgtccagtgactggtgggtccctgggggccagctgccttctcatcctgggaggtggcccttcccaagcccatcagggcgtgtgagcagactgaaggggccgctgcagcccctggccctcaatacccagctgcttctggctaagagtgcagcagagactgaggcatagccagcttcaaaagcgatctgacatgaaagtcattaacaaagccagccgtgaaaaggtgccccagagttgctgtggacagacctgtaaggacttgcaaaacaaaagaaagtgaggggtttttttaacctcagagctagctgctctctgcagcctcctccactggcttctctggctcacccaagctctcccttacagaggcaacacagaattataaggaatcagaaatcccccttctaccaggctgcaaatgtggctctagcacttgcaaattgttttttcttccgaatagttcagcagggacaagttatctgaggggcaaaatgcctgcttggaggtctgcaattttggaacactgcagtatggaactttggcattggagggtctgtaaaatatttttgttcttttaccaccaacttaggggactgttttaaagagccatcccaaggcctctcctagcaggcagaagccactcctctgataacggcctctgtaaatgttctgatttgctctcagctgcagagacacagagacactgcagatgtcacacgctttcatcttccctttgagcccttttgaaccctcctggggctctggggtagatgagagaagcctgaaaaaggcagagtttgaaagctcccatttaaaaacaaaatactttttaaagccctcttgcctcttccctgcccactcctgccccctgaccagaagacagaatttgaagctggaaagggaagaccccttttcccctcctcctgtccccagtgagtcttagcgagacttttgccctgcgcacaattgcatctgaatgtgcgggggagagggctgggggccggagggcaggcaaggcctggggggtgctcgtgatatgtgctcaagccagttgtgggaaaaactcgagtcctcccctcctcccgacctaccccgtgtggctgcttttggctggattccctgcacccagtgcaacacaccctttccccttcactctcccttggttactatggaaacaagggtgtcattgatgtgggctgagctggggaacatgtcggtgcacagctgaaagtcagcgattatgccggcggttagaaatgtgccagggttaaaggagtccgcagctcccacggctgctgggaggacatggtcctgcccccttccttcctccctccctccgtctccacttctctctccttgcttttgacaaatttctttattcccctctggactaaagtagtggctatttttgtgccactctgcgccccaccctcactgttggccgctccttatccggcctggcctggagggtgacaccatgtcaccctcaccaggactcgtctctccattcccgtcagagtttgctttgatttccctttcctttccttctcggggaccagttcttacttccttttatttttagctctgcactccatgtggtttcagggttcagtctgatccatcaaaaggttctttttttataatcccttttgaaaatgataatcaaaggaagagatgtggtgtttggtcatgtggaaaactcaatgtataatttagacgtctgtcaaaaatccgacaaataaaatttagctggaacgaaaaaaaaaaaaaaaaaaaaaaa

SEQ ID NO: 20 - DNA, 4225 bp, Homo sapiens
ggagtcgcggctgcgagcaggttagagttacttgttattggtaaatagccactatggaggctaaggaccagaagaaacacagaaagaaaaacagtggacccaaagctgcaaagaaaaagaagcggcttctgcaggatctccagctaggagacgaagaagatgcccggaagagaaatcccaaagcttttgcagttcagtctgctgtgcggatggctcgatcctttcacaggactcaggatttgaagacaaaaaagcatcatattccagtggttgatcgaactccactagagcccccaccaatagtggtagtggtgatgggacctccaaaagttggaaagagcactttgatacaatgcctcattcggaactttacccggcagaagttgaccgagatcagaggccctgtgacgattgtgtcaggtaaaaagcgcagactcaccattattgaatgtgggtgtgacattaacatgatgattgatctggctaaagtagcagatctggtactgatgcttatagatgccagctttgggtttgaaatggaaacgtttgagtttctaaacatctgtcaagtacatggctttcctaaaattatgggagttctcacccacctcgactccttcaagcataataagcaactgaagaagacaaagaagcgattaaaacacaggttctggacggaagtttacccgggtgccaagctgttctacctttctggaatggtgcatggagaatatcaaaaccaagaaatccacaatctgggccgttttattacagttatgaagtttaggcctctcacatggcaaacttctcacccttatatcctggcagacaggatggaagatttgacaaacccagaggatatccgaacaaacatcaaatgtgaccggaaggtgtcactttatggttatttaagaggagcacacttgaaaaataaaagccaaattcacatgccaggggtaggagattttgccgtgagtgacatcagtttcctcccagacccttgcgctcttcctgaacaacaaaagaagcgctgtttaaatgagaaggagaagctggtttatgcgcctctttctggagttgggggtgtgctgtatgacaaagacgctgtctatgttgaccttggtggcagccacgtttttcaggatgaagtggggcccacccatgagctggtccagagtctcatctctacccactccaccattgatgccaagatggcttcaagtcgagtgacgctgttttctgattccaagccacttgggtcagaggatatagataatcaagggctaatgatgccaaaggaggaaaaacaaatggacttgaacactggtcgaatgcgtcggaaagccattttcggagatgaagatgaatctggagatagtgatgatgaagaagatgatgaaatgtctgaagatgacgggttggaaaacggctctagtgatgaggaagcagaagaggaggaaaatgctgagatgactgatcagtatatggctgttaagggcatcaaacgacggaaacttgagttggaagaagacagtgaaatggatttgccagcatttgctgacagtgacgatgaccttgagaggagctcagcggaagaaggggaagcggaggaagctgatgaaagcagtgaagaagaggactgcactgcaggagagaagggcatttcaggatcaaaggctgctggagaaggtagtaaagcagggctgtcaccagctaattgccagagtgaccgtgtgaatctggagaagtctttgctgatgaagaaagcagctctccccactttcgattctgggcattgcacagctgaagaggtgtttgcatctgaagatgaatctgaagaaagctcctcactcagtgcagaggaagaagactcagaaaatgaagaggctattagaaaaaagctttcaaagccttctcaagtgagcagtggtcagaaactggggccacagaacttcattgatgagaccagtgatatagaaaatttactcaaagaggaagaagattacaaggaagaaaataatgattccaaagaaacgtcaggtgccctcaagtggaaggaagacctttccagaaaggcagctgaggcctttctgaggcagcagcaagcagctccaaacctccgaaagcttatttatgggacagtgacagaagataatgaagaagaagatgatgatactctagaagagcttggagggttgtttcgtgtcaaccagcctgacagagagtgtaagcacaaggctgactctttggactgctccagatttcttgtggaggccccccatgactgggatttagaggaggttatgaacagtatcagagattgcttcgtgactggaaagtgggaagatgataaagatgcagccaaggtcttagcagaagatgaggagctctacggtgactttgaagacttggaaacaggggacgtgcacaagggaaaatcaggccccaatactcagaatgaagatatagagaaagaagttaaggaagaaattgaccctgacgaagaagaaagtgccaagaaaaagcatttggataagaagagaaaattgaaggagatgtttgatgcagaatatgatgaaggagaaagcacatattttgatgatcttaaaggagaaatgcagaaacaagcacagctgaatcgcgcagaatttgaagatcaagatgatgaagccagagttcagtatgagggttttcgacctgggatgtacgtccgcattgagattgaaaatgttccctgtgaatttgtgcagaactttgacccccattaccccattatcctgggtggcttgggcaacagtgagggaaatgttggctacgtgcagatgcgtctgaagaaacatcgctggtataagaaaatcctcaagtcccgagatccaatcatattttctgtagggtggaggaggtttcagaccatcccactgtattatatcgaagaccacaatggaagacaaaggcttctaaagtataccccacagcacatgcattgcggagcagccttttggggccctatcactccacagggaactggtttcttggcaatacagtctgtcagtggcataatgcctgattttcggatagctgctacaggagttgtccttgatctggataaatccataaaaattgtgaagaaattaaagctaactggttttccatataaaattttcaagaacacttcatttattaagggaatgtttaattctgccttggaagtggccaaatttgaaggtgctgtgattcgaacagtcagtgggataagggggcagatcaagaaagcactccgagctccagaaggagctttcagggccagctttgaggataagctgctgatgagcgatattgtcttcatgcgaacttggtatcctgtttccatcccagcgttctataacccagtaacatctttgttgaaaccagtgggtgagaaagacacctggtcaggaatgcggaccacgggccaactcaggctcgcccatggcatcagactaaaggcgaacaaggactctctgtataagccaatcctgaggcaaaagaaacattttaattcactgcacattccaaaagccttgcagaaggccctgccatttaagaacaagcccaagacccaagcaaaggcaggcaaggtgccaaaggacaggcggagaccggccgtcatacgcgagcctcatgaaagaaagatccttgcactgctggatgctctgagtacggtgcatagtcagaagatgaagaaggccaaggagcagcggcacctgcacaataaagagcacttcagagccaagcagaaggaggaggaggagaagctgaagcggcagaaggacctcaggaagaagctcttcagaattcaggggcagaaggaaagaagaaaccagaagtccagtttgaagggggctgagggccaattgcagtgagcctttggactggagggactgtccctggatctgcggaggtagacagtttcaaacatcacagtttgaatgcctgtgaatgacacgtcagtgggaaagagctcaagagatgtctctactcaaactgtgcctgcaggaggaggaacagagaagcctgggctgctgggactgggttcattctcatgacttggggctgtcgagatttaaagtgatgtaagctgtggttatgtggattctcttactttcctctgcctgcctcagtttaattattttgtcctacagaaatatcattaaaatatttttttgttaaaaaaaaaaaaaaaaaa

SEQ ID NO: 21 - DNA, 1536 bp, Homo sapiens
aacgcaggccgggcgggaagagccaaagcgggcaggcggcggaaatatccgaagcggcggggcgcccgaggccgttgccgacctccgcgctaaagccgctgctgccgcggaagacgatcctccagtacccgcccgccgtcaccgcagctgccgtgtcctcctcccacccctagccgcaccccctcgcggagggatcagctgagcggccaaacggcacggtcgggggagccccgagtccgcagctgcagcggggcctgagaccagagttggcgagggcaaggaaggagcggccccgggcagtgggggcggggccgggcgggcccgagaacagccgaatttggccgagcgctgccgagcgagtccgaggcgctgggccaggccggagccggactacgggagccgaggcgggccgcgcggtgggcgcggagaggagcggagcggcgcggcaggccgggcgggtggcggcagcagcggaggaggccgcagctgcgggtccgaggagcggaggcgacgcgggcggcggcggggggccgggtggccggggtcccgggccccgcggcggcggcagcggcggcggcggcggcaggatgatcaagctgttctcgctgaagcagcagaagaaggaggaggagtcggcgggcggcaccaagggcagcagcaagaaggcgtcggcggcgcagctgcggatccagaaggacataaacgagctgaacctgcccaagacgtgtgatatcagcttctcagatccagacgacctcctcaacttcaagctggtcatctgtcctgatgagggcttctacaagagtgggaagtttgtgttcagttttaaggtgggccagggttacccgcatgatccccccaaggtgaagtgtgagacaatggtctatcaccccaacattgacctcgagggcaacgtctgcctcaacatcctcagagaggactggaagccagtccttacgataaactccataatttatggcctgcagtatctcttcttggagcccaaccccgaggacccactgaacaaggaggccgcagaggtcctgcagaacaaccggcggctgtttgagcagaacgtgcagcgctccatgcggggtggctacatcggctccacctactttgagcgctgcctgaaatagggttggcgcatacccacccccgccacggccacaagccctggcatcccctgcaaatatttattgggggccatgggtaggggtttggggggcggccggtgggggaatcccctgccttggccttgcctccccttcctgccacgtgcccctagttatttttttttttttaacaccatgtgattaaggtcggcgctgcctcccccgacccactcagcgatgggaaatgaattggcttgtctagcccccctgctgggtgcttgttcagcccccactctgggctgtggagtgggtgggcaacgggcctgggtagctgggcccaggcaacccacccctccacctctggaggtcccaccaggctattaaaggggaatgttactgcaaaaaaaaaaaaaaaaaaaaa

SEQ ID NO: 22 - DNA, 1696 bp, Homo sapiens
caaaggacttcctagtgggtgtgaaaggcagcggtggccacagaggcggcggagagatggccttcagcggttcccaggctccctacctgagtccagctgtccccttttctgggactattcaaggaggtctccaggacggacttcagatcactgtcaatgggaccgttctcagctccagtggaaccaggtttgctgtgaactttcagactggcttcagtggaaatgacattgccttccacttcaaccctcggtttgaagatggagggtacgtggtgtgcaacacgaggcagaacggaagctgggggcccgaggagaggaagacacacatgcctttccagaaggggatgccctttgacctctgcttcctggtgcagagctcagatttcaaggtgatggtgaacgggatcctcttcgtgcagtacttccaccgcgtgcccttccaccgtgtggacaccatctccgtcaatggctctgtgcagctgtcctacatcagcttccagaacccccgcacagtccctgttcagcctgccttctccacggtgccgttctcccagcctgtctgtttcccacccaggcccagggggcgcagacaaaaacctcccggcgtgtggcctgccaacccggctcccattacccagacagtcatccacacagtgcagagcgcccctggacagatgttctctactcccgccatcccacctatgatgtacccccaccccgcctatccgatgcctttcatcaccaccattctgggagggctgtacccatccaagtccatcctcctgtcaggcactgtcctgcccagtgctcagaggttccacatcaacctgtgctctgggaaccacatcgccttccacctgaacccccgttttgatgagaatgctgtggtccgcaacacccagatcgacaactcctgggggtctgaggagcgaagtctgccccgaaaaatgcccttcgtccgtggccagagcttctcagtgtggatcttgtgtgaagctcactgcctcaaggtggccgtggatggtcagcacctgtttgaatactaccatcgcctgaggaacctgcccaccatcaacagactggaagtggggggcgacatccagctgacccatgtgcagacataggcggcttcctggccctggggccgggggctggggtgtggggcagtctgggtcctctcatcatccccacttcccaggcccagcctttccaaccctgcctgggatctgggctttaatgcagaggccatgtccttgtctggtcctgcttctggctacagccaccctggaacggagaaggcagctgacggggattgccttcctcagccgcagcagcacctggggctccagctgctggaatcctaccatcccaggaggcaggcacagccagggagaggggaggagtgggcagtgaagatgaagccccatgctcagtcccctcccatcccccacgcagctccaccccagtcccaagccaccagctgtctgctcctggtgggaggtggcctcctcagcccctcctctctgacctttaacctcactctcaccttgcaccgtgcaccaacccttcacccctcctggaaagcaggcctgatggcttcccactggcctccaccacctgaccagagtgttctcttcagaggactggctcctttcccagtgtccttaaaataaagaaatgaaaatgcttgttggca

SEQ ID NO: 23 - DNA, 3649 bp, Homo sapiens
cccgctgtagccgcgtgtgggaggacgcacgggcctgcttcaaagctttgggataacagcgcctccgggggataatgaatgcggagcctccgttttcagtcgacttcagatgtgtctccacttttttccgctgtagccgcaaggcaaggaaacatttctcttcccgtactgaggaggctgaggagtgcactgggtgttcttttctcctctaacccagaactgcgagacagaggctgagtccctgtaaagaacagctccagaaaagccaggagagcgcaggagggcatccgggaggccaggaggggttcgctggggcctcaaccgcacccacatcggtcccacctgcgagggggcgggacctcgtggcgctggaccaatcagcacccacctgcgctcacctggcctcctcccgctggctcccgggggctgcggtgctcaaaggggcaagagctgagcggaacaccggcccgccgtcgcggcagctgcttcacccctctctctgcagccatggggctccctcgtggacctctcgcgtctctcctccttctccaggtttgctggctgcagtgcgcggcctccgagccgtgccgggcggtcttcagggaggctgaagtgaccttggaggcgggaggcgcggagcaggagcccggccaggcgctggggaaagtattcatgggctgccctgggcaagagccagctctgtttagcactgataatgatgacttcactgtgcggaatggcgagacagtccaggaaagaaggtcactgaaggaaaggaatccattgaagatcttcccatccaaacgtatcttacgaagacacaagagagattgggtggttgctccaatatctgtccctgaaaatggcaagggtcccttcccccagagactgaatcagctcaagtctaataaagatagagacaccaagattttctacagcatcacggggccgggggcagacagcccccctgagggtgtcttcgctgtagagaaggagacaggctggttgttgttgaataagccactggaccgggaggagattgccaagtatgagctctttggccacgctgtgtcagagaatggtgcctcagtggaggaccccatgaacatctccatcatcgtgaccgaccagaatgaccacaagcccaagtttacccaggacaccttccgagggagtgtcttagagggagtcctaccaggtacttctgtgatgcaggtgacagccacggatgaggatgatgccatctacacctacaatggggtggttgcttactccatccatagccaagaaccaaaggacccacacgacctcatgttcaccattcaccggagcacaggcaccatcagcgtcatctccagtggcctggaccgggaaaaagtccctgagtacacactgaccatccaggccacagacatggatggggacggctccaccaccacggcagtggcagtagtggagatccttgatgccaatgacaatgctcccatgtttgacccccagaagtacgaggcccatgtgcctgagaatgcagtgggccatgaggtgcagaggctgacggtcactgatctggacgcccccaactcaccagcgtggcgtgccacctaccttatcatgggcggtgacgacggggaccattttaccatcaccacccaccctgagagcaaccagggcatcctgacaaccaggaagggtttggattttgaggccaaaaaccagcacaccctgtacgttgaagtgaccaacgaggccccttttgtgctgaagctcccaacctccacagccaccatagtggtccacgtggaggatgtgaatgaggcacctgtgtttgtcccaccctccaaagtcgttgaggtccaggagggcatccccactggggagcctgtgtgtgtctacactgcagaagaccctgacaaggagaatcaaaagatcagctaccgcatcctgagagacccagcagggtggctagccatggacccagacagtgggcaggtcacagctgtgggcaccctcgaccgtgaggatgagcagtttgtgaggaacaacatctatgaagtcatggtcttggccatggacaatggaagccctcccaccactggcacgggaacccttctgctaacactgattgatgtcaatgaccatggcccagtccctgagccccgtcagatcaccatctgcaaccaaagccctgtgcgccaggtgctgaacatcacggacaaggacctgtctccccacacctcccctttccaggcccagctcacagatgactcagacatctactggacggcagaggtcaacgaggaaggtgacacagtggtcttgtccctgaagaagttcctgaagcaggatacatatgacgtgcacctttctctgtctgaccatggcaacaaagagcagctgacggtgatcagggccactgtgtgcgactgccatggccatgtcgaaacctgccctggaccctggaagggaggtttcatcctccctgtgctgggggctgtcctggctctgctgttcctcctgctggtgctgcttttgttggtgagaaagaagcggaagatcaaggagcccctcctactcccagaagatgacacccgtgacaacgtcttctactatggcgaagaggggggtggcgaagaggaccaggactatgacatcacccagctccaccgaggtctggaggccaggccggaggtggttctccgcaatgacgtggcaccaaccatcatcccgacacccatgtaccgtcctcggccagccaacccagatgaaatcggcaactttataattgagaacctgaaggcggctaacacagaccccacagccccgccctacgacaccctcttggtgttcgactatgagggcagcggctccgacgccgcgtccctgagctccctcacctcctccgcctccgaccaagaccaagattacgattatctgaacgagtggggcagccgcttcaagaagctggcagacatgtacggtggcggggaggacgactaggcggcctgcctgcagggctggggaccaaacgtcaggccacagagcatctccaaggggtctcagttcccccttcagctgaggacttcggagcttgtcaggaagtggccgtagcaacttggcggagacaggctatgagtctgacgttagagtggtggcttccttagcctttcaggatggaggaatgtgggcagtttgacttcagcactgaaaacctctccacctgggccagggttgcctcagaggccaagtttccagaagcctcttacctgccgtaaaatgctcaaccctgtgtcctgggcctgggcctgctgtgactgacctacagtggactttctctctggaatggaaccttcttaggcctcctggtgcaacttaatttttttttttaatgctatcttcaaaacgttagagaaagttcttcaaaagtgcagcccagagctgctgggcccactggccgtcctgcatttctggtttccagaccccaatgcctcccattcggatggatctctgcgtttttatactgagtgtgcctaggttgccccttattttttattttccctgttgcgttgctatagatgaagggtgaggacaatcgtgtatatgtactagaacttttttattaaagaaacttttcccagaaaaaaaaaaaaaa

SEQ ID NO: 24 - DNA, 2869 bp, Homo sapiens
ggtccacccagtgcttgcggcctcgcggccgggccggcctgggctgcaatcaatgcggctttgtctgggacgcccacatcccagaggccattcccgggtcggcaaatcggagcgcggccggggcgcgcgggggtgagataagcggccatgtgatcccacctgggctggaaggggaggggcgccaggtgaggcggcggccggcggggcgcgggcggccacgcggggctcctgcagcatggctgtcagcaggaaggactggtccgcgctgtccagccttgcccggcagaggactctggaggatgaggaggaacaggagcgcgagcgcaggcggcggcaccgcaacctgagctccaccacggacgatgaggctcccaggctcagccagaatggagaccggcaggcctctgcttctgagagactaccgagcgtggaagaagcagaggtgcccaagccactgcccccagcctccaaagatgaggacgaggacatccagagcatcctcagaacacggcaggagcggaggcagaggcggcaggtggtggaggctgcacaggcccccatccaggagaggctggaggcagaggaggggaggaacagcttgagccctgtgcaggccacacagaaacccctagtctccaagaaggaactggaaatcccacctcgccggagactgagtcgggaacagcggggcccctgggccctggaggaggagagcttggtgggcagggagccagaagagaggaagaaaggggttccagaaaagtccccagtcttggagaagtcctccatgccaaagaagacggcacctgaaaagagcctggtctccgataaaacctccatctctgagaaggtgctggcctcagagaagacatctctatcagagaagatagcagtgtcagagaaaagaaacagctcagagaagaagtctgttctagaaaaaaccagtgtctctgagaagtcgctggccccagggatggcactgggctcaggaaggaggctggtgtctgagaaagcttccatctttgagaaggcactggcctcagagaagagcccaactgcagatgctaagccggccccaaagagggccacagcctcagagcagcccctggcgcaggagccgccagcctctgggggaagcccagccaccaccaaggagcagagaggaagggccctccctgggaagaacctgccctctttggcaaagcagggggcttcagaccctccgactgtggcctcccgcctcccacccgtcacactccaggtgaaaatccccagcaaggaggaagaggcagatatgtcctcacccacacagcgaacctacagcagctccctcaaacgctccagccccaggaccatctcctttcggatgaaacccaagaaagaaaactcggaaacaaccctaactcgcagtgccagcatgaagctcccagacaacacagtgaagttgggagagaagctggagagataccacacggccatacggagatcagaatctgtcaagtctcggggtctgccttgcactgagttattcgtggctcctgtgggtgtagccagcaagcgccacctctttgagaaggaactggcgggccagagccgagcagaaccagcctccagccggaaggagaacttgaggctctcaggggttgtgacatcaaggctcaacctgtggatcagcaggacccaggaatctggagatcaggacccccaggaggcacagaaagcatcatctgcaaccgagaggactcagtggggacagaaatctgactcctcgctggacgctgaggtgtgacaagccccgccaagacagacctgcaagtcttcgtctcaagggacctccctcatgccaggcccctgcctctcacagcagcaccctttcctctcattgtccctgttccctttttgcctgtggatctgtttggccagggtccctggggtcaggaatatttgcaagactcagccagctccttcccagcccagcctcttggggctgggactttctcaccctgcggcaggcacaacagatgctgggacccagtctctgcccaggtcacagcacaagtgcacatcagcactatggggcctatgtcctgcccagagacctctgctccttcctgctcacatccacagtcagggcacggcgcccctcaagaactccagagtcacctgtctcatcggctcccagcaagtgcctctttgtctatgatgtcccccttctctgaggcctggacccacccatctttgtccctggggcctgctcccagccactgaggcccgctctggccaggggagaaggagctgccgtgcgtcttccctgtgccccgtctccctgcttggttctcccctcccttccctggccggctgccatggccaggagctaagtgcctttttgtgtgcaaccacttaccctttctctgaaaaacctgttctcaggaaggatctgataaactcatttactctcaggtgtaagagactgatgagaccttagaagcgaattcctctctggaggccttgctttctagcagaggtcacctgaagtgtgtgaggaggatcatcattttcctcatcccccctcttctcacattaaggtggtggcttgccactcagcagtcctagcttggtgactgggaactgccacatacagggccaggcctaccctccttccccacaagccccctccaacccccacccccatgctctggacctcatggctcctatgagcttggagcatggtgaaccatcagagaatctagaaccaaccaagctaggaacatcagcctggtgccctgttaaccccttaaagctgtggtttacaacttttcaaaaatttaaatcattagaaaaaaaaaaaaaaaaaaaaaaaaaaaaaaaa

SEQ ID NO: 25 - DNA, 5039 bp, Homo sapiens
caagccgactgtgagccaggaagtgctcttggggagcccaggccaagccatccattcttgggtcctttggagggtagatatggattcccagtttctccagcggccagtgctccccctagtccacacagtgagaccgtgaaagcagatgctccggggcactcctgggcagcttttgctcagtggatgatgggtgactacagactccctgaccacccccagcccatggaaattctcaacctgtacttgggagacagcctggagccccacccaggagagtgcccaagggaaacgtgcagccatgaggatccaccggagcctttcgaggagcaaacctgggccactgaccctcctgaacctaccagacaaaatgttcctccctggggctccggtgtggagctcacacacctggggagctgggtccatcaggacgggctggagccttgccaggagcaaacccgggccactgaccctcctgaatctaccagacaagatgctcctccctggggctccggtgtggagctcacacacctggggagcccctctgcccagagggagcacaggcagaacacagcatcaccagggtcaccagtgaacagccatctaccggggagcccaaagcagaaccggagcacgtccacacaggtagtgttctgggcaggcatcctgcaggcccagatgtgtgtcctagacctggaggaggagctggagaagacggaagggctcaaggctgggctgaaatgctgtctccccacgccccctgtggacctccccggggacacgggcctgcactccagcccacctgagaatgaagactcaggggaagacagcagtgagcctgagggagagggccaggcatggctgagagagggaaccccagactcttccccacagtggggagctgaggaggagagcatgttcttcagcaaccccctcttcctggcgagtccttgctcagagaacagtgcttctggagagtgcttttcctggggggcttcagactcccatgcaggtgtgaggactggacctgagagcccagcgactctggagcctcccctcccagaagacacagtgctgtgggagctggaaagtgagccagatttgggggacggcgctgctatcagtgggcattgtacccctccattccctgtgcccatctataaaccacactccatctgctgggcctcagtggctgccgctgagggggctcctgcagcacctcctggtcacggggagagtgagggagataggcttggtcctgctccatctgcagcaccgtgtgtggacgaagcattgacctgggaatcaggatgtgtcggatctgatcttggccctgctgcacatcctgtgcaaccttgggcctctctcagccctgagggctggcagagaggaggtcctttttggccccaggtgactcttaactcccaggacagagatgagagggagggtggacacccccaggaatctcttccctgcaccttggccccctgcccctggaggagcccagcttcttctccagagcctagcagcccagaatctgagagcagaggccctggtcccaggcccagccctgcatcgtcccaggagggcagcccgcagcttcaacaccacagctcaggcattttgcccaagtggacactagatgcttcacagtcttcactcttggagacggatggggaacagccaagttccttgaagaaaaaggaggcaggggaggccccaaaaccaggcgaggaagtaaagagtgaaggaacagccaggcctgcagagactggagacgtccagcctgacattcacctgacttctgcagaacatgagaatctgaggacaccgatgaactcttcttggcttcctgggagccctatgccccaagcacagtccccagaggaaggccagagaccaccagctggagacaagctagctaatggcgtcaggaacaacaaggtagcctggaacttggcctcacgcctctatcgcctggagggcttccggaagtctgaagtggctgcctacctgcagaagaacaatgactttagcagggctgtggctgaggagtacctgtccttcttccagtttggaggccagagtctggaccgagccctccggagcttcctccaggccttggtgctcagtggggagactcaggaacgggagcgaatcctctaccagttctccagacgcttccaccattgcaatccggggatcttcccctcagtagattctgtacacaccttgacatgtgcaatcatgctgcttaacacggacctgcatggacagaacattgggaagagcatgagctgccaggaattcataaccaacctgaatgggctgagggatggcgggaacttccccaaggagctgctgaaggccctctactggtctatccgcagcgagaagctcgagtgggccgtggatgaagaagacacagccagacctgagaaggcccagccgtccctgccagctggcaagatgagcaagcccttccttcagctggctcaggatcccacagtgcccacctacaagcagggcatcctggctcggaaaatgcatcaagatgcagacggcaagaagacgccatggggcaagcgtggctggaagatgttccacaccttactgcgagggatggttctctacttcctgaagcagggagaagaccactgtctggagggggagagcttggtggggcagatggtggatgagcccgtgggggtgcaccactcgctggccacccccgccacgcattacaccaagaagccgcacgtcttccagctgcgcacggctgactggcgcctctacctcttccaggcacccactgccaaggagatgagctcctggatcgcgcgcatcaacttggctgcggccacgcactccgcgccgcccttccccgccgctgtgggctcccagcgcagattcgtgcggcccatcctgcccgtgggccccgcccagagctccctggaggagcagcatcgatcccacgagaactgcctggacgctgccgcggacgacctgctggatctacagaggaacctgccggagcggcggggccgtggccgcgagctggaggagcaccgcctgcggaaggagtacctggagtacgagaaaacccgctacgagacctacgtgcagctgctggtggcccgcctgcactgcccctctgatgctctggacctgtgggaggagcagctggggagggaagctggaggcactcgggagcccaagctcagcctgaagaagtcccactcgagcccgtccctgcaccaggatgaggctcccaccacggccaaggtgaagcgcaacatctcagagcgcagaacctaccggaagatcatccctaagcggaaccgcaatcagctgtgaagccagcaccacctcagagacactgttccctgctccagggtagacctgagatgaacctccctggaggagacttatttcaatgagtccaccatgacggatgaggcacctcctttccctgctgaaggacaaaccttgtttccctgtggccctcattcttgtgctccctgaagctttcctaatattgctgtgctccccaccacccccatggcagtccctccgcagccccagtccctggccacgcccaagggaagagggaggtgaggacttgactttcctcccagagctcagcccatgtcaccctccaggccccagaatccagagtggcctcatttcctagacttgctgagaactcagcacttgtttgagaaccagtgcttatgtggtgtgcccttggcttctgggggagagcttggggcagcagaggcccctgggcagcccagccaggggagccacagccccgaggatggtcttgctctgggaattaggtgaccttcctggggaggccccaggagagtgaatcagggactcttgagaaattcctaaccagcctcctgtgacccagggagcagggtcgctaaggtcctgcccactgaggggacagccttctgggcagggacctcggggggcttcaagggctctgcacggctgtggggccctgtgcctttgtctccttgtgtctcctttcccccgaagtagatgaaacagtctcacatacccaactgctcatcaacagagcagagctgatggcatgagtgagggctgggcggggtggggcctccagagctttgcagggaaccctggaaccctaggaacaaggagcctttgttccaacagagcagagaaggaggttctctatgttcagaccactggagaggatagagaggtaaaaggtggcgacagtttcccttaggggtctgcctggcaggagccacagctcaggagagttgtgagggatgggacggaggctggcgaccaggcgaggcctaggccaggctcgggagacttttctgtgctcctttctacacatgccttaaaccttccttcctgtggggtgcctggaccccttccccatctctggcagctcagagggtctctgctgctctcccctgggaaatcccctcatcctgccctctggctgcctcccagctgggcttgttctctgagggaggttccggagactcatggacttggggctctgcctgtaggaaggaggctgggccggagggaccagccaccattgtctctgttcagccaagtgtgcaagtaggctgcccgccaagagggggcctctgctacccgctgctgcctgccggctgacacactgcctccccagccttcctgctaggccaccctcctcccttcccatgcttgtaaccagctctggggcttgcacctccacaaagtaaggttggcccttggaggccatgtttgggtctccggccagggcctagggctaggccatgcacccaatgggtgcacaataaataacaggtcaacaaagagggaggtgtgtcagtgtgtgaggaagggaggtcaggcagctaggaccacctgcagtgtggcaggcttcatccctctttgctccaagtgtgtatgtgtgtctgtgcatgtgtgtagtgtctgtgtctgtgtgttcatgcatatgcaggagtcacacggtcataggccatcaaagctggaggaga

SEQ ID NO: 26 - DNA, 562 bp, Homo sapiens
  misc_feature (1)..(562): n = a,c,t, or g
gaaattcaggcgatttattgtaaacaggataaccctagcactccaccatactggctgtgtcacatgctccctctttcacatcaactggtcaaaaaagaagactttcttaagaagcctcaggtaactaataacttagttccacaaatctcatttactaagcactgcgtaaactgcagtatctggggtagtctgttattgctcatggactgcagcttggacccatctaaatgaatccattagtatgcctgagtgatcaacagcagctctagatccaacctggaaattggaaaatgctgacgcataccaaacaattgcaggttcatgggaagactacatgagattgctctcagatctcttcatgtgtcattctcataaaaaagacacttaaatttcacccattttttaaaaaagagctaaaagttactcaatagcacataattttccacataaaaggtaggtggatttttatttactagtacagtgggtggatcggnacactcaggcctaanttcagatctggtcctggtataacctgcaggtttaatggaaagctggcaagtct

SEQ ID NO: 27 - DNA, 3279 bp, Homo sapiens
ccggctcgaagcgcaacgaggaagcgtttgcggtgatcccggcgactgcgctggctaatgcggtaccggctagcgtggcttctgcaccccgcactgcccagcaccttccgctcagtcctcggcgcccgcctgccgcctccggagcgcctgtgtggtttccaaaaaaagacttacagcaaaatgaataatccagccatcaagagaataggaaatcacattaccaagtctcctgaagacaagcgagaatatcgagggctagagctggccaatggtatcaaagtacttcttatgagtgatcccaccacggataagtcatcagcagcacttgatgtgcacataggttcattgtcggatcctccaaatattgctggcttaagtcatttttgtgaacatatgctttttttgggaacaaagaaataccctaaagaaaatgaatacagccagtttctcagtgagcatgcaggaagttcaaatgcctttactagtggagagcataccaattactattttgatgtttctcatgaacacctagaaggtgccctagacaggtttgcacagttttttctgtgccccttgttcgatgaaagttgcaaagacagagaggtgaatgcagttgattcagaacatgagaagaatgtgatgaatgatgcctggagactctttcaattggaaaaagctacagggaatcctaaacaccccttcagtaaatttgggacaggtaacaaatatactctggagactagaccaaaccaagaaggcattgatgtaagacaagagctactgaaattccattctgcttactattcatccaacttaatggctgtttgtgttttaggtcgagaatctttagatgacttgactaatctggtggtaaagttattttctgaagtagagaacaaaaatgttccattgccagaatttcctgaacaccctttccaagaagaacatcttaaacaactttacaaaatagtacccattaaagatattaggaatctctatgtgacatttcccatacctgaccttcagaaatactacaaatcaaatcctggtcattatcttggtcatctcattgggcatgaaggtcctggaagtctgttatcagaacttaagtcaaagggctgggttaatactcttgttggtgggcagaaggaaggagcccgaggttttatgttttttatcattaatgtggacttgaccgaggaaggattattacatgttgaagatataattttgcacatgtttcaatacattcagaagttacgtgcagaaggacctcaagaatgggttttccaagagtgcaaggacttgaatgctgttgcttttaggtttaaagacaaagagaggccacggggctatacatctaagattgcaggaatattgcattattatcccctagaagaggtgctcacagcggaatatttactggaagaatttagacctgacttaatagagatggttctcgataaactcagaccagaaaatgtccgggttgccatagtttctaaatcttttgaaggaaaaactgatcgcacagaagagtggtatggaacccagtacaaacaagaagctataccggatgaagtcatcaagaaatggcaaaatgctgacctgaatgggaaatttaaacttcctacaaagaatgaatttattcctacgaattttgagattttaccgttagaaaaagaggcgacaccataccctgctcttattaaggatacagtcatgagcaaactttggttcaaacaagatgataagaaaaaaaagccgaaggcttgtctcaactttgaatttttcagcccatttgcttatgtggaccccttgcactgtaacatggcctatttgtaccttgagctcctcaaagactcactcaacgagtatgcatatgcagcagagctagcaggcttgagctatgatctccaaaataccatctatgggatgtatctttcagtgaaaggttacaatgacaagcagccaattttactaaagaagattattgagaaaatggctacctttgagattgatgaaaaaagatttgaaattatcaaagaagcatatatgcgatctcttaacaatttccgggctgaacagcctcaccagcatgccatgtactacctccgcttgctgatgactgaagtggcctggactaaagatgagttaaaagaagctctggatgatgtaacccttcctcgccttaaggccttcatacctcagctcctgtcacggctgcacattgaagcccttctccatggaaacataacaaagcaggctgcattaggaattatgcagatggttgaagacaccctcattgaacatgctcataccaaacctctccttccaagtcagctggttcggtatagagaagttcagctccctgacagaggatggtttgtttatcagcagagaaatgaagttcacaataactgtggcatcgagatatactaccaaacagacatgcaaagcacctcagagaatatgtttctggagctcttctgtcagattatctcggaaccttgcttcaacaccctgcgcaccaaggagcagttgggctatatcgtcttcagcgggccacgtcgagctaatggcatacagagcttgagattcatcatccagtcagaaaagccacctcactacctagaaagcagagtggaagctttcttaattaccatggaaaagtccatagaggacatgacagaagaggccttccaaaaacacattcaggcattagcaattcgtcgactagacaaaccaaagaagctatctgctgagtgtgctaaatactggggagaaatcatctcccagcaatataattttgacagagataacactgaggttgcatatttaaagacacttaccaaggaagatatcatcaaattctacaaggaaatgttggcagtagatgctccaaggagacataaggtatccgtccatgttcttgccagggaaatggattcttgtcctgttgttggagagttcccatgtcaaaatgacataaatttgtcacaagcaccagccttgccacaacctgaagtgattcagaacatgaccgaattcaagcgtggtctgccactgtttccccttgtgaaaccacatattaacttcatggctgcaaaactctgaagattccccatgcatgggaaagtgcaagtggatgcattcctgagtcttccagagcctaagaaaatcatcttggccactttaatagtttctgattcactattagagaaacaaacaaaaaattgtcaaatgtcattatgtagaaatattataaatccaaagtaa

SEQ ID NO: 28 - DNA, 573 bp, Homo sapiens
tagtcgcctgaggattttttattgtgttttccacatagataaaaaaataaggctttttgatgaaaagaatccattacaaagtcaaaaatccattacaattataattgaatcagtaacaaaatttagctttaaatgagtcaagtattctgcatttgaaatttaatatcacaaacattcaagattagtgaattttggtaagaaaaaaatactagaagaaaggaaaaggacaccttttcaacagatagtaatttataaaaatttttttaaaagtgctttgggaaaacacacagtatcattacttaagaaaagtcatttaaggaagacttaagtgcttcaagtggagtgtattacagactaaaaaatgttttaaaatttgccaagaaatttaagtgttaaaaatactcttctccttattcagtttcatgtttaaggaaacatttgacagacaagtaaaccaaacgcaaaaaaaagttcacctgcattttaaactaataaattctggatctgtaaaagctcttggtttgtacacagaggccaatgctgacatttattgatctatttttatgtagttaa

SEQ ID NO: 29 - DNA, 6256 bp, Homo sapiens
cgcgccgccgctcgctcacctgcgctcccgcccgcccctcggtgcgcgcccggcccgccagccgccgccgcccgcaccccgagcgccaccatgaactcgctcttcaggaagagaaacaaaggcaaatacagccccactgtgcagacccggagcatctctaacaaggagctctcggagctgatcgagcagctgcagaagaatgccgaccaggtggagaagaacatcgtggacacagaggccaagatgcagagtgacctggctcggctgcaggagggtcggcagcctgagcaccgggacgtgaccctgcagaaggtgttggactctgagaagctgctctatgtgctagaggcggatgcggccattgccaagcacatgaagcacccacagggggacatgatcgccgaggatatccgccagctgaaggagcgtgtgaccaacctgcgcgggaaacacaagcagatctacaggctggcggtgaaggaagtggatccacaggtcaactgggcggcactggtggaggagaagctggacaagctgaacaaccagagctttgggactgacctgccgctggtggaccaccaagtggaggagcataacatcttccacaatgaggtcaaggccatcgggccccacctggccaaggacggggacaaggagcagaacagcgaactccgggccaagtaccagaaactgctggcagcatcacaggcccggcagcagcacctgagttcgctgcaggactacatgcagcgctgcaccaatgagctgtactggctggaccagcaggccaagggccgcatgcagtacgactggagtgaccgcaacctcgactaccccagccgccggcgccagtatgagaatttcatcaaccggaacctggaggccaaagaggagagaatcaacaaactgcacagcgagggcgaccagctgctggcggccgagcaccccgggaggaactccattgaggcgcacatggaggctgtgcacgcagactggaaggagtacctgaacctgctcatctgcgaggagagccacctcaagtacatggaggactaccaccagtttcacgaagacgtgaaggacgctcaggagctgctgcgcaaggtggactcggacctgaaccagaagtatggccctgacttcaaggaccggtaccagattgagctgctgctgcgggagctggatgaccaggagaaggtgctggacaagtatgaggacgtggtgcaggggctgcagaagcgaggccagcaggtggtgcccctcaagtaccgccgggagactccgctcaagcccatccccgtggaggcactctgtgactttgagggggagcagggcctgatctcgcggggctacagctacaccctgcagaagaacaacggggagagctgggagctcatggacagcgctgggaacaagctgattgctccggccgtctgttttgtgatcccccccacagaccctgaggccctggctctggctgacagcctgggcagccagtaccggagcgtgcggcagaaggcagctgggagcaaacgcacgctgcagcagcggtatgaggtgctgaagaccgagaatcccggagatgcctctgacctacaggggcggcagctgctggctggcttggacaaggtggccagcgacctggaccggcaggagaaggccatcacagggatcctgcggccaccactggagcaaggccgggctgtgcaggacagtgccgagcgggccaaggacctcaagaacatcaccaacgagctactgcggattgaacctgagaagacgcggagcacggctgagggcgaagccttcatccaggccctcccaggcagtggcaccacacccctgctgaggacccgggtggaggacaccaaccggaaatacgagcacctcctgcagctgctggacttggcccaggagaaggttgatgtggccaaccgcctggagaagagcctgcagcagagctgggagttgctggccacacacgagaaccatctgaatcaggatgacacagtgcctgagagcagccgtgtcctggacagcaaggggcaggagctggcggccatggcctgtgagttacaggcccagaagtccctcctgggtgaggtggagcagaacttgcaggcggccaagcagtgctcgagcacactggccagccgcttccaggagcactgcccggacctggagcgccaggaggccgaggtgcacaagctgggccagcgtttcaacaacctgcgccagcaggtggaacgcagggcgcagagcctacagagcgccaaggcagcctacgagcacttccaccgcggccatgaccacgtgctgcagttcctagtcagcatccccagttacgagccccaggagacagacagcctcagccagatggagaccaagctgaagaaccagaagaacctgctagatgagatagcaagtagggagcaggaagtacagaagatctgtgccaattcccagcagtaccagcaagctgtaaaggactatgagttagaagcagaaaaactaaggtctcttctcgacttggagaatggaaggagcagccacgtgagcaagagagccaggctccaatctcctgccaccaaagtgaaggaagaggaagcagcacttgccgccaagttcactgaagtttatgccatcaacagacagaggctgcagaatctggagtttgctctgaatctcctcagacagcagccggaagtagaagtgacccatgagaccctgcaaaggaataggccggactctggagtggaggaggcgtggaagatcaggaaggaactggatgaggagactgagcggaggcggcagctggagaacgaggtcaagagcacccaggaagaaatctggaccttgaggaatcaggggcctcaggaatcggtggtgaggaaggaggtgctcaagaaggtgccggatcccgtgctggaggagagcttccagcagctgcagcggacgctggcagaggagcagcacaagaaccagctgctgcaggaggagctggaggcactgcagctgcagctgcgtgccctggagcaggagaccagagacggggggcaggagtacgtggtcaaggaggtcctgcgcatcgagcctgacagggcccaggcggatgaggtcttgcagctgcgggaggagctggaggcactgaggcggcagaagggcgcccgggaggcagaggtgctcctcctgcagcagcgtgtggccgccctggctgaagagaagagccgggcgcaggagaaggtcacagagaaagaggtggtgaaactgcagaatgacccccagctggaggcagagtaccagcagctgcaggaggaccaccagcgccaggaccagctcagggagaagcaggaggaggagctgagcttcctccaggacaagctcaagaggctagagaaggagcgggccatggccgagggcaagatcaccgtcaaggaggtgctcaaggtggagaaggacgcggccaccgagagggaggtcagcgatctcacccgccaatatgaggacgaggctgccaaggctcgcgctagccagagggagaagacggagctgctccgaaagatatgggccttggaggaggagaacgccaaagtggtggtgcaggagaaggtgcgggagatcgtgcggccagaccccaaggcggaaagtgaagtggcgaacctccgcctggagcttgtggagcaggagcgaaagtaccggggtgccgaggagcagctccggagctaccagagtgagctggaggccctcaggaggcgaggcccccaggtggaagtcaaagaggtgactaaggaagtcattaagtacaagactgaccctgagatggagaaggagcttcagcggctcagggaggagatcgtggacaagaccagactgatcgaaaggtgtgatttagagatctaccagctgaaaaaggaaatccaggccctgaaagacaccaaaccccaggtccagaccaaagaggtggtccaggagatcctccaattccaagaagaccctcaaaccaaggaggaggtggcgtctctgagggcaaagctctcagaggagcagaagaaacaagtggatctggagagggaaagagcttcccaggaagagcagatcgcccggaaagaggaggagctctcgcgggtgaaggaaagggtggtgcagcaggaggtggtcaggtatgaggaggagccaggcctgcgggccgaggcgagcgcctttgccgagagcatcgatgtggagctgcggcagattgacaagctgcgggcagagctgcggcggctgcagcgccggcgcaccgagcttgagcggcagctggaggagctagagcgcgagcggcaggcccgcagggaggccgagcgcgaggtacagcggttgcagcagcggctggcagcgctggagcaggaagaagctgaggcccgtgagaaggtaacccatacgcagaaggtggtgctgcagcaggacccgcagcaggcgcgagagcatgccctgctccgactccagctggaagaagagcagcaccggcggcagctcctggagggggagctcgagaccctccggaggaaactggctgcactggagaaggcggaggtcaaggagaaggtggtgctctccgagagtgtccaggtggagaagggcgacaccgagcaagagatccagaggctcaagagcagcctggaggaggagagccgcagcaagcgcgagctggacgtcgaggtgagccggctggaagccaggctttcggagctggaattccataactccaagtcatccaaggaactagactttctgagggaagagaaccacaaattacagctggagaggcaaaacctgcagctggagacccgaaggctccaatcggaaatcaacatggcagcgacggaaacacgagacctgcggaacatgaccgtggcggactctgggaccaaccatgactccagactgtggtccctggagagggaactggatgacctcaagaggctctccaaggacaaagacctcgagatcgacgagctgcagaagcgcctgggctccgtggccgtcaagcgggagcagcgggagaaccacctgcggcgctccatcgtagtcatccaccctgacacaggccgcgagctgtccccggaggaagcccaccgtgccgggctcattgactggaacatgttcgtgaaactcagaagccaggagtgcgactgggaggagatctcagtgaagggtcccaatggggagtcctcagtgatacacgacaggaagtctggcaagaagttctccatcgaagaggccctgcagagtggcaggctgacccctgctcagtatgaccgctatgtcaacaaggatatgtccatccaggagctggcggtcttggtatctgggcagaagtaggcacagctcttgcaactcttcgtaacggcagacgctggccctctcctacgacgcagtgacctccttggtgtcgtcctctccctagccctggtgcaggccaagcattttatacataccctcgctgccaggctgctcagagtcccgcccacatatgagacaggcactggctgaagacaggcaactctcgtcccaaccatcattcaccctgagtgacgtacttcatcctccaatgactggacaactgcgatgccttttcctcccttttcctgtacactcccagcaacaaactcctcatgataactgcacacaatctgaaaaccactgaaggacaagccaaccacagcagccaagcccactccttgcagcatgggtactggtggcacaccagacagtgacactgccccacaaaggcctgggcccgtgggggctgctgcctggcatgacatctctccagatttctggcttaaaaccaactttccatccgagaagcctcctcagtagttactctgctcatgagacagatctgggctccaagccaggaaaggtgaacagaaaccacaagtgtccagccctcggtgctggagtggacgttaattgtcagccaccagactgtcccggcacctacagagaatgtttcacagttctggcatttaaatcctttgatagtggattgtgctgctgttagccttagtttcagtgctttacaagtctcgcttattatctcattggtatttaggtatacaaaacagttgattattcaccacgccaatatctgggtctctgtatctcatgtagaacataagaaaatgggaactaatagggaaatttatttatagcatgaaaataaacctggtggctggagtctgcttgtacggtcaaaaaaaaaaaaaaaaaa

SEQ ID NO: 30 - DNA, 3448 bp, Homo sapiens
gactgggtcatccctccaatcaacttgccagaaaactccaggggaccttttcctcaagagcttgtcaggatcaggtctgatagagataaaaacctttcactgcggtacagtgtaactgggccaggagctgaccagcctccaactggtatcttcattctcaaccccatctcgggtcagctgtcggtgacaaagcccctggatcgcgagcagatagcccggtttcatttgagggcacatgcagtagatattaatggaaatcaagtggagaaccccattgacattgtcatcaatgttattgacatgaatgacaacagacctgagttcttacaccaggtttggaatgggacagttcctgagggatcaaagcctggaacatatgtgatgaccgtaacagcaattgatgctgacgatcccaatgccctcaatgggatgttgaggtacagaatcgtgtctcaggctccaagcaccccttcacccaacatgtttacaatcaacaatgagactggtgacatcatcacagtggcagctggacttgatcgagaaaaagtgcaacagtatacgttaataattcaagctacagacatggaaggcaatcccacatatggcctttcaaacacagccacggccgtcatcacagtgacagatgtcaatgacaatcctccagagtttactgccatgacgttttatggtgaagttcctgagaacagggtagacatcatagtagctaatctaactgtgaccgataaggatcaaccccatacaccagcctggaacgcagtgtacagaatcagtggcggagatcctactggacggttcgccatccagaccgacccaaacagcaacgacgggttagtcaccgtggtcaaaccaatcgactttgaaacaaataggatgtttgtccttactgttgctgcagaaaatcaagtgccattagccaagggaattcagcacccgcctcagtcaactgcaaccgtgtctgttacagttattgacgtaaatgaaaacccttattttgcccccaatcctaagatcattcgccaagaagaagggcttcatgccggtaccatgttgacaacattcactgctcaggacccagatcgatatatgcagcaaaatattagatacactaaattatctgatcctgccaattggctaaaaatagatcctgtgaatggacaaataactacaattgctgttttggaccgagaatcaccaaatgtgaaaaacaatatatataatgctactttccttgcttctgacaatggaattcctcctatgagtggaacaggaacgctgcagatctatttacttgatattaatgacaatgcccctcaagtgttacctcaagaggcagagacttgcgaaactccagaccccaattcaattaatattacagcacttgattatgacattgatccaaatgctggaccatttgcttttgatcttcctttatctccagtgactattaagagaaattggaccatcactcggcttaatggtgattttgctcagcttaatttaaagataaaatttcttgaagctggtatctatgaagttcccatcataatcacagattcgggtaatcctcccaaatcaaatatttccatcctgcgcgtgaaggtttgccagtgtgactccaacggggactgcacagatgtggacaggattgtgggtgcggggcttggcaccggtgccatcattgccatcctgctctgcatcatcatcctgcttatccttgtgctgatgtttgtggtatggatgaaacgccgggataaagaacgccaggccaaacaacttttaattgatccagaagatgatgtaagagataatattttaaaatatgatgaagaaggtggaggagaagaagaccaggactatgacttgagccagctgcagcagcctgacactgtggagcctgatgccatcaagcctgtgggaatccgacgaatggatgaaagacccatccacgccgagccccagtatccggtccgatctgcagccccacaccctggagacattggggacttcattaatgagggccttaaagcggctgacaatgaccccacagctccaccatatgactccctgttagtgtttgactatgaaggcagtggctccactgctgggtccttgagctcccttaattcctcaagtagtggtggtgagcaggactatgattacctgaacgactgggggccacggttcaagaaacttgctgacatgtatggtggaggtgatgactgaacttcagggtgaacttggtttttggacaagtacaaacaatttcaactgatattcccaaaaagcattcagaagctaggctttaactttgtagtctactagcacagtgcctgctggaggctttggcataggctgcaaaccaatttgggctcagagggaatatcagtgatccatactgtttggaaaaacactgagctcagttacacttgaattttacagtacagaagcactgggattttatgtgcctttttgtacctttttcagattggaattagttttctgtttaaggctttaatggtactgatttctgaaacgataagtaaaagacaaaatattttgtggtgggagcagtaagttaaaccatgatatgcttcaacacgcttttgttacattgcatttgcttttattaaaatacaaaattaaacaaacaaaaaaactcatggagcgattttattatcttgggggatgagaccatgagattggaaaatgtacattacttctagttttagactttagtttgttttttttttttttcactaaaatcttaaaacttactcagctggttgcaaataaagggagttttcatatcaccaatttgtagcaaaattgaattttttcataaactagaatgttagacacattttggtcttaatccatgtacacctttttatttctgtatttttccacttcactgtaaaaatagtatgtgtacataatgttttattggcatacgtctatggagaagtgcagaaacttcagaacatgtgtatgtattatttggactatggattcaggttttttgcatgtttatatctttcgttatggataaagtatttacaaaacagtgacatttgattcaattgttgagctgtagttagaatactcaatttttaatttttttaatttttttattttttattttctttttggtttggggagggagaaaagttcttagcacaaatgttttacataatttgtaccaaaaaaaaaaaaaaaggaaaggaaagaaaggggtggcctgacactggtggcactactaagtgtgtgtttttttaaaaaaaaaatggaaaaaaaaaagcctttaaactggagagacttctgacaacagctttgcctctgtattgtgtaccagaatataaatgatacacctctgaccccagcgttctgaataaaatgctaattttggataacaaaaaaaggggaattc

SEQ ID NO: 31 - DNA, 4122 bp, Homo sapiens
tttgtcatcagctcgctctccattggcggggagcggagagcagcgaagaagggggtggggaggggaggggaagggaagggggtggaaactgcctggagccgtttctccgcgccgctgttggtgctgccgctgcctcctcctcctccgccgccgccgccgccgccgccgcctcctccggctcttcgctcggcccctctccgcctccatgtgccggatagcgggagcgctgcggaccctgctgccgctgctggcggccctgcttcaggcgtctgtagaggcttctggtgaaatcgcattatgcaagactggatttcctgaagatgtttacagtgcagtcttatcgaaggatgtgcatgaaggacagcctcttctcaatgtgaagtttagcaactgcaatggaaaaagaaaagtacaatatgagagcagtgagcctgcagattttaaggtggatgaagatggcatggtgtatgccgtgagaagctttccactctcttctgagcatgccaagttcctgatatatgcccaagacaaagagacccaggaaaagtggcaagtggcagtaaaattgagcctgaagccaaccttaactgaggagtcagtgaaggagtcagcagaagttgaagaaatagtgttcccaagacaattcagtaagcacagtggccacctacaaaggcagaagagagactgggtcatccctccaatcaacttgccagaaaactccaggggaccttttcctcaagagcttgtcaggatcaggtctgatagagataaaaacctttcactgcggtacagtgtaactgggccaggagctgaccagcctccaactggtatcttcattatcaaccccatctcgggtcagctgtcggtgacaaagcccctggatcgcgagcagatagcccggtttcatttgagggcacatgcagtagatattaatggaaatcaagtggagaaccccattgacattgtcatcaatgttattgacatgaatgacaacagacctgagttcttacaccaggtttggaatgggacagttcctgagggatcaaagcctggaacatatgtgatgaccgtaacagcaattgatgctgacgatcccaatgccctcaatgggatgttgaggtacagaatcgtgtctcaggctccaagcaccccttcacccaacatgtttacaatcaacaatgagactggtgacatcatcacagtggcagctggacttgatcgagaaaaagtgcaacagtatacgttaataattcaagctacagacatggaaggcaatcccacatatggcctttcaaacacagccacggccgtcatcacagtgacagatgtcaatgacaatcctccagagtttactgccatgacgttttatggtgaagttcctgagaacagggtagacatcatagtagctaatctaactgtgaccgataaggatcaaccccatacaccagcctggaacgcagtgtacagaatcagtggcggagatcctactggacggttcgccatccagaccgacccaaacagcaacgacgggttagtcaccgtggtcaaaccaatcgactttgaaacaaataggatgtttgtccttactgttgctgcagaaaatcaagtgccattagccaagggaattcagcacccgcctcagtcaactgcaaccgtgtctgttacagttattgacgtaaatgaaaacccttattttgcccccaatcctaagatcattcgccaagaagaagggcttcatgccggtaccatgttgacaacattcactgctcaggacccagatcgatatatgcagcaaaatattagatacactaaattatctgatcctgccaattggctaaaaatagatcctgtgaatggacaaataactacaattgctgttttggaccgagaatcaccaaatgtgaaaaacaatatatataatgctactttccttgcttctgacaatggaattcctcctatgagtggaacaggaacgctgcagatctatttacttgatattaatgacaatgcccctcaagtgttacctcaagaggcagagacttgcgaaactccagaccccaattcaattaatattacagcacttgattatgacattgatccaaatgctggaccatttgcttttgatcttcctttatctccagtgactattaagagaaattggaccatcactcggcttaatggtgattttgctcagcttaatttaaagataaaatttcttgaagctggtatctatgaagttcccatcataatcacagattcgggtaatcctcccaaatcaaatatttccatcctgcgcgtgaaggtttgccagtgtgactccaacggggactgcacagatgtggacaggattgtgggtgcggggcttggcaccggtgccatcattgccatcctgctctgcatcatcatcctgcttatccttgtgctgatgtttgtggtatggatgaaacgccgggataaagaacgccaggccaaacaacttttaattgatccagaagatgatgtaagagataatattttaaaatatgatgaagaaggtggaggagaagaagaccaggactatgacttgagccagctgcagcagcctgacactgtggagcctgatgccatcaagcctgtgggaatccgacgaatggatgaaagacccatccacgctgagccccagtatccggtccgatctgcagccccacaccctggagacattggggacttcattaatgagggccttaaagcggctgacaatgaccccacagctccaccatatgactccctgttagtgtttgactatgaaggcagtggctccactgctgggtccttgagctcccttaattcctcaagtagtggtggtgagcaggactatgattacctgaacgactgggggccacggttcaagaaacttgctgacatgtatggtggaggtgatgactgaacttcagggtgaacttggtttttggacaagtacaaacaatttcaactgatattcccaaaaagcattcagaagctaggctttaactttgtagtctactagcacagtgcttgctggaggctttggcataggctgcaaaccaatttgggctcagagggaatatcagtgatccatactgtttggaaaaacactgagctcagttacacttgaattttacagtacagaagcactgggattttatgtgcctttttgtacctttttcagattggaattagttttctgtttaaggctttaatggtactgatttctgaaacgataagtaaaagacaaaatattttgtggtgggagcagtaagttaaaccatgatatgcttcaacacgcttttgttacattgcatttgcttttattaaaatacaaaattaaacaaacaaaaaaactcatggagcgattttattatcttgggggatgagaccatgagattggaaaatgtacattacttctagttttagactttagtttgttttttttttttcactaaaatcttaaaacttactcagctggttgcaaataaagggagttttcatatcaccaatttgtagcaaaattgaattttttcataaactagaatgttagacacattttggtcttaatccatgtacacttttttatttctgtatttttccacttcactgtaaaaatagtatgtgtacataatgttttattggcatagtctatggagaagtgcagaaacttcagaacatgtgtatgtattatttggactatggattcaggttttttgcatgtttatatctttcgttatggataaagtatttacaaaacagtgacatttgattcaattgttgagctgtagttagaatactcaatttttaatttttttaatttttttattttttattttctttttggtttggggagggagaaaagttcttagcacaaatgttttacataatttgtaccaaaaaaaaaaaaaaggaaaggaaagaaaggggtggcctgacactggtggcactactaagtgtgtgttttttaaaaaaaaaaatggaaaaaaaaaagcttttaaactggagagacttctgacaacagctttgcctctgtattgtgtaccagaatataaatgatacacctctgaccccagcgttctgaataaaatgctaattttggaaaaaaaaaaaaaaaaa

SEQ ID NO: 32 - DNA, 4471 bp, Homo sapiens
gcggaacgctagcggtgttggcgcggagtggaccccggctgcggcccctggcaatggcgccaccatcggtcccggagtcccagtgatgctctgtgccatagagcccccataacttcactactacgtgatagtaaatccccggcaaaaaccagcagcgccttgcaagcccacgccaccccaagcatcccaggactcttctgaaacgactccgggctaccagatcggccgtccagctggaatcaaccgatggaggctccgctgcaaactggaatggtgcttggcgtgatgatcggggccggagtggcggtggtggtcacggccgtgctcatcctcctggtggtgcggaggctgcgagtgccaaaaaccccagccccggatggcccccggtatcggttccggaagagggacaaagtgctcttctatggccggaagattatgcggaaggtgtcacaatccacctcctccctcgtggatacctctgtctccgccacctcccggccacgcatgaggaagaaactgaagatgctcaacattgccaagaagatcctgcgcatccagaaagagacgcccacgctgcagcggaaggagcccccgcccgcagtgctagaagctgacctgaccgagggcgacctggctaactcccatctgccctctgaagtgctttatatgctcaagaacgtccgggtgctgggccacttcgagaagccactcttcctggagctctgccgccacatggtcttccagcggctgggccagggtgactacgtcttccggccgggccagccagatgccagcatctacgtggtgcaggacgggctgctggagctctgtctgccagggcctgacgggaaggagtgtgtggtgaaggaagtggttcctggggacagcgtcaacagccttctcagcatcctggatgtcatcaccggtcaccagcatccccagcggaccgtgtctgcccgggcggcccgggactccacggtgctgcgcctgccggtggaagcattctccgcggtcttcaccaagtacccggagagcttggtgcgggtcgtgcagatcatcatggtgcggctgcagcgagtcaccttcctggcactgcacaactacctgggtctgaccaatgagctcttcagccacgagatccagcccctgcgtctgttccccagccccggcctcccaactcgcaccagccctgtgcggggctccaagagaatggtcagcacctcagctacagacgagcccagggagaccccagggcggccacccgatcccaccggggccccgctgcctggacctacaggggaccctgtgaagcccacatccctggaaaccccctcgccccctctgctgagccgctgcgtctccatgccaggggacatctcaggcttgcagggtggcccccgctccgacttcgacatggcctatgagcgtggccggatctccgtgtccctgcaagaagaggcctccggggggtccctggcagcccccgctcggacccccactcaggagcctcgtgagcagccggcaggcgcctgtgaatacagctactgtgaggatgagtcggccactggtggctgccctttcgggccctaccagggccgccagaccagcagcatcttcgaggcagcaaagcaggagctggccaagctgatgcggattgaggacccctccctcctgaacagcagagtcttgctgcaccacgccaaagctggcaccatcattgcccgccagggagaccaggacgtgagcctgcacttcgtgctctggggctgcctgcacgtgtaccagcgcatgatcgacaaggcggaggacgtgtgcctgttcgtagcgcagcccggggaactggtggggcagctggcggtgctcactggcgaacctctcatcttcacactgcgagcccaacgcgactgcaccttcctgcggatctccaagtccgacttctatgagatcatgcgcgcacagcccagtgtggtgctgagtgcggcgcacacggtggcagccaggatgtcgcccttcgtgcgccagatggacttcgccatcgactggactgcagtggaggcgggacgcgcgctgtacaggcagggcgaccgctccgactgcacttacatcgtgctcaatgggcggctgcgtagcgtgatccagcgaggcagtggcaagaaggagctggtgggcgagtacggccgcggcgacctcatcggcgtggtggaggcactgacccggcagccgcgagccacgacggtgcacgcggtgcgcgacacggagctggccaagcttcccgagggcaccttgggtcacatcaaacgccggtacccgcaggtcgtgacccgccttatccacctactgagccagaaaattctagggaatttgcagcagctgcaaggacccttcccagcaggctctgggttgggtgtgcccccacactcggaactcaccaacccagccagcaacctggcaactgtggcaatcctgcctgtgtgtgctgaggtccccatggtggccttcacgctggagctgcagcacgccctgcaggccatcggtccgacgctactccttaacagtgacatcatccgggcacgcctgggggcctccgcactggatagcatccaagagttccggctgtcagggtggctggcccagcaggaggatgcacaccgtatcgtactctaccagacggacgcctcgctgacgccctggaccgtgcgctgcctgcgacaggccgactgcatcctcattgtgggcctgggggaccaggagcctaccctcggccagctggagcagatgctggagaacacggctgtgcgcgcccttaagcagctagtcctgctccaccgagaggagggcgcgggccccacgcgcaccgtggagtggctaaatatgcgcagctggtgctcggggcacctgcacctgcgctgtccgcgccgcctcttttcgcgccgcagccctgccaagctgcatgagctctacgagaaggttttctccaggcgcgcggaccggcacagcgacttctcccgcttggcgagggtgctcacggggaacaccattgcccttgtgctaggcgggggcggggccaggggctgctcgcacatcggagtactaaaggcattagaggaggcgggggtccccgtggacctggtgggcggcacgtccattggctctttcatcggagcgttgtacgcggaggagcgcagcgccagccgcacgaggcagcgggcccgggagtgggccaagagcatgacttcggtgctggaacctgtgttggacctcacgtacccagtcacctccatgttcactgggtctgcctttaaccgcagcatccatcgggtcttccaggataagcagattgaggacctgtggctgccttacttcaacgtgaccacagatatcaccgcctcagccatgcgagtccacaaagatggctccctgtggcggtacgtgcgcgccagcatgacgctgtcgggctacctgcccccgctgtgcgaccccaaggacgggcacctactcatggatggcggctacatcaacaatctgccagcggacatcgcccgcagcatgggtgccaaaacggtcatcgccattgacgtggggagccaggatgagacggacctcagcacctacggggacagcctgtccggctggtggctgctgtggaagcggctgaatccctgggctgacaaggtaaaggttccagacatggctgaaatccagtcccgcctggcctacgtgtcctgtgtgcggcagctagaggttgtcaagtccagctcctactgcgagtacctgcgcccgcccatcgactgcttcaagaccatggactttgggaagttcgaccagatctatgatgtgggctaccagtacgggaaggcggtgtttggaggctggagccgtggcaacgtcattgagaaaatgctcacagaccggcggtctacagaccttaatgagagccgccgtgcagacgtgcttgccttcccaagctctggcttcactgacttggcagagattgtgtcccggattgagccccccacgagctatgtctctgatggctgtgctgacggagaggagtcagattgtctgacagagtatgaggaggacgccggacccgactgctcgagggatgaaggggggtcccccgagggcgcaagccccagcactgcctccgagatggaggaggagaagtcgattctccggcaacgacgctgtctgccccaggagccgcccggctcagccacagatgcctgaggacctcgacaggggtcaccccctccctcccacccctggactgggctgggggtggccccgtgggggtagctcactccccctcctgctgctatgcctgtgacccccgcggcccacacactggactgacctgccctgagcggggatgcagtgttgcactgatgacttgaccagcccctcccccaataaactcgcctcttggaaaaaaaaaaaaaaaaaaaaaaaaaaaaaaaaaaaaaaaaaa

SEQ ID NO: 33 - DNA, 2634 bp, Homo sapiens
acaggcacaggtgaggaactcaactcaaactcctctctctgggaaaacgcggtgcttgctcctcccggagtggccttggcagggtgttggagccctcggtctgccccgtccggtctctggggccaaggctgggtttccctcatgtatggcaagagctctactcgtgcggtgcttcttctccttggcatacagctcacagctctttggcctatagcagctgtggaaatttatacctcccgggtgctggaggctgttaatgggacagatgctcggttaaaatgcactttctccagctttgcccctgtgggtgatgctctaacagtgacctggaattttcgtcctctagacgggggacctgagcagtttgtattctactaccacatagatcccttccaacccatgagtgggcggtttaaggaccgggtgtcttgggatgggaatcctgagcggtacgatgcctccatccttctctggaaactgcagttcgacgacaatgggacatacacctgccaggtgaagaacccacctgatgttgatggggtgataggggagatccggctcagcgtcgtgcacactgtacgcttctctgagatccacttcctggctctggccattggctctgcctgtgcactgatgatcataatagtaattgtagtggtcctcttccagcattaccggaaaaagcgatgggccgaaagagctcataaagtggtggagataaaatcaaaagaagaggaaaggctcaaccaagagaaaaaggtctctgtttatttagaagacacagactaacaattttagatggaagctgagatgatttccaagaacaagaaccctagtatttcttgaagttaatggaaacttttctttggcttttccagttgtgacccgttttccaaccagttctgcagcatattagattctagacaagcaacacccctctggagccagcacagtgctcctccatatcaccagtcatacacagcctcattattaaggtcttatttaatttcagagtgtaaattttttcaagtgctcattaggttttataaacaagaagctacatttttgcccttaagacactacttacagtgttatgacttgtatacacatatattggtatcaaaagggataaaagccaatttgtctgttacatttcctttcacgtatttcttttagcagcacttctgctactaaagttaatgtgtttactctctttccttcccacattctcaattaaaaggtgagctaagcctcctcggtgtttctgattaacagtaaatcctaaattcaaactgttaaatgacatttttatttttatgtctctccttaactatgagacacatcttgttttactgaatttctttcaatattccaggtgatagatttttgttgttttgttaattaatccaagatttacaatagcacaacgctaaatcacacagtaactacaaaaggttacatagatatgaaaagattggcagaggccattgcaggatgaatcacttgtcacttttcttctgtgctgggaaaaataatcaacaatgtgggtctttcatgagcagtgacggatagtttagcttactatgtttcccccccaattcaatgatctataacaacagagcaaagtctatgctcatttgcagactggaatcattaagtaatttaataaaaaaattgtgaaacagcatattacaagtttgaaaattcagggctggtgaaaaaaatcaactctaaatgatgataattttgtacagttttatataaaactctgagaactagaagaaattattaactttttttcttttttaattctaattcacttgtttattttgggggaggaagactttggtatggagcaaagaaataccaaaactactttaaatggaataaaaccaactttattctttttttcccccatactggtagataaagcaaactttataagtgggctattgaaagaaaagttacaagcttaagatacagaagcatttgttcaaaggatagaaagcatctaaaagtttaggctcaagatcaatctttacagattgatattttcagtttttaatcgactggactgcagatgttttttcttttaacaaactggaattttcaaacagattatctgtatttaaatgtatagaccttgatatttttccaatactattttttaaaaaattgtatgatttacatatgaacctcagttctgaaattcattacatatctgtctcattctgccttttatactgtctaaaaaagcaaagttttaaagtgcaattttaaaactgtaaattacatctgaaggctatatatcctttaatcacattttatattttttcttcacaattctaacctttgaaaatattataactggatatttcttcaaacagatgtcctggatgatggtccataagaataatgaagaagtagttaaaaatgtatggacagtttttccggcaaaatttgtagcttatgtcttggctaaatagtcaaggggtaatatgggcctgttgtttagtgtctccttcctaaagagcacttttgtattgtaatttattttttattatgctttaaacactatgtaaataaacctttagtaataaagaattatcagttataaaaaaaaaaaaaaaaaaa

SEQ ID NO: 34 - DNA, 2623 bp, Homo sapiens
gaggaactcaactcaaactcctctctctgggaaaacgcggtgcttgctcctcccggagtggccttggcagggtgttggagccctcggtctgccccgtccggtctctggggccaaggctgggtttccctcatgtatggcaagagctctactcgtgcggtgcttcttctccttggcatacagctcacagctctttggcctatagcagctgtggaaatttatacctcccgggtgctggaggctgttaatgggacagatgctcggttaaaatgcactttctccagctttgcccctgtgggtgatgctctaacagtgacctggaattttcgtcctctagacgggggacctgagcagtttgtattctactaccacatagatcccttccaacccatgagtgggcggtttaaggaccgggtgtcttgggatgggaatcctgagcggtacgatgcctccatccttctctggaaactgcagttcgacgacaatgggacatacacctgccaggtgaagaacccacctgatgttgatggggtgataggggagatccggctcagcgtcgtgcacactgtacgcttctctgagatccacttcctggctctggccattggctctgcctgtgcactgatgatcataatagtaattgtagtggtcctcttccagcattaccggaaaaagcgatgggccgaaagagctcataaagtggtggagataaaatcaaaagaagaggaaaggctcaaccaagagaaaaaggtctctgtttatttagaagacacagactaacaattttagatggaagctgagatgatttccaagaacaagaaccctagtatttcttgaagttaatggaaacttttctttggcttttccagttgtgacccgttttccaaccagttctgcagcatattagattctagacaagcaacacccctctggagccagcacagtgctcctccatatcaccagtcatacacagcctcattattaaggtcttatttaatttcagagtgtaaattttttcaagtgctcattaggttttataaacaagaagctacatttttgcccttaagacactacttacagtgttatgacttgtatacacatatattggtatcaaaagggataaaagccaatttgtctgttacatttcctttcacgtatttcttttagcagcacttctgctactaaagttaatgtgtttactctctttccttcccacattctcaattaaaaggtgagctaagcctcctcggtgtttctgattaacagtaaatcctaaattcaaactgttaaatgacatttttatttttatgtctctccttaactatgagacacatcttgttttactgaatttctttcaatattccaggtgatagatttttgttgttttgttaattaatccaagatttacaatagcacaacgctaaatcacacagtaactacaaaaggttacatagatatgaaaagattggcagaggccattgcaggatgaatcacttgtcacttttcttctgtgctgggaaaaataatcaacaatgtgggtctttcatgagcagtgacggatagtttagcttactatgtttcccccccaattcaatgatctataacaacagagcaaagtctatgctcatttgcagactggaatcattaagtaatttaataaaaaaattgtgaaacagcatattacaagtttgaaaattcagggctggtgaaaaaaatcaactctaaatgatgataattttgtacagttttatataaaactctgagaactagaagaaattattaactttttttcttttttaattctaattcacttgtttattttgggggaggaagactttggtatggagcaaagaaataccaaaactactttaaatggaataaaaccaactttattctttttttcccccatactggtagataaagcaaactttataagtgggctattgaaagaaaagttacaagcttaagatacagaagcatttgttcaaaggatagaaagcatctaaaagtttaggctcaagatcaatctttacagattgatattttcagtttttaatcgactggactgcagatgttttttcttttaacaaactggaattttcaaacagattatctgtatttaaatgtatagaccttgatatttttccaatactattttttaaaaaattgtatgatttacatatgaacctcagttctgaaattcattacatatctgtctcattctgccttttatactgtctaaaaaagcaaagttttaaagtgcaattttaaaactgtaaattacatctgaaggctatatatcctttaatcacattttatattttttcttcacaattctaacctttgaaaatattataactggatatttcttcaaacagatgtcctggatgatggtccataagaataatgaagaagtagttaaaaatgtatggacagtttttccggcaaaatttgtagcttatgtcttggctaaatagtcaaggggtaatatgggcctgttgtttagtgtctccttcctaaagagcacttttgtattgtaatttattttttattatgctttaaacacgtatgtaaataaacctttagtaataaagaattatcagttataaaaaaaaaaaaaaaaaaa

SEQ ID NO: 35 - DNA, 698 bp, Homo sapiens
cggcagccagaagacgcggtcccgcaggtgctgcgccagcgagaggcggtacagcgcctccgcccgcaggctgtgcatctcccgggccaccttctggcagtgcgccagctcacggcgcagctcggccttgcgggcgggcgcggcgctgtgcggcaggtgggcctcgggcggctggggcgcctcggagggcggggccggcacgcctagctgggggcagcccttggcctggaagagctgcagcaccaggtccagcacgcgcccgttgacgcgccaggcgcagttgcccagttgggtgagggcgtccagtgcgccatgcagcgcggtgggcgggcaggtttccagcagctcctggtgctgcgtggcgccttccaccgtgcgcatcagcttggtggggctgagcaggaaggcaccagagtgcggcgatgtccagggcagcggggggcaaagcatgggtacatccaccgcctcgaaggtcagcgtgggctccgcggccttctccagcagctgcacgtaagccgggtgcggcttcatgatgccgatctgctggacgtagcggtacgaatacacgaggtagagcacggtgacaagccgagaggaacgatgcggcttgtccacgctgcatggcatctgcgtagcctgcaccatcatgtacgccagcatcttggtcacatcatcagcactgacagaggccatggctg

SEQ ID NO: 36 - DNA, 510 bp, Homo sapiens
caatataatagtatgttttattaagataaatcactattcttcttgtccatcaacatatactttttacatttttgcttaatttacaattcgagttaatattttgagaacgtaaggaaagacaaataggtaaatgtcttgttgaaagggttaagatactgacaggacataccttcctgttccatcctatataaaatccactcatgagttggatgccaagtatagatttctgaaactcataaccaccaatcacgataatgcaatcattaaaactcacaccattgcaaggaccaagtataaaatattctgctactattttagatacttcaaaaacatccactactttaagtgaaaagctttaaatggggcaatggctattggctttttaatggaaattaaagaagaatttttctattattctgtttcgatcaactattaacctttaggataattgttttatgtgaaaaaaattagaaatttttttaaagcaaaattagtactattggtttttat

SEQ ID NO: 37 - DNA, 4312 bp, Homo sapiens
cgaccgcggcggctggaaccctgattgctgtccttcaacgtgttcattatgaagttattagtaatacttttgttttctggacttataactggttttagaagtgactcttcctctagtttgccacctaagttactactagtatcctttgatggcttcagagctgattatctgaagaactatgaatttcctcatctccagaattttatcaaagaaggtgttttggtagagcatgttaaaaatgtttttatcacaaaaacatttccaaaccactacagtattgtgacaggcttgtatgaagaaagccatggcattgtggctaattccatgtatgatgcagtcacaaagaaacacttttctgactctaatgacaaggatcctttttggtggaatgaggcagtacctatttgggtgaccaatcagcttcaggaaaacagatcaagtgctgctgctatgtggcctggtactgatgtacccattcacgataccatctcttcctattttatgaattacaactcctcagtgtcatttgaggaaagactaaataatattactatgtggctaaacaattcgaacccaccagtcacctttgcaacactatattgggaagaaccagatgcaagtggccacaaatacggacctgaagataaagaaaacatgagcagagtgttgaaaaaaatagatgatcttatcggtgacttagtccaaagactcaagatgttagggctatgggaaaatcttaatgtgatcattacaagtgatcatgggatgacccagtgttctcaggacagactgataaacctggattcctgcatcgatcattcatactacactcttatagatttgagcccagttgctgcaatacttcccaaaataaatagaacagaggtttataacaaactgaaaaactgtagccctcatatgaatgtttatctcaaagaagacattcctaacagattttattaccaacataatgatcgaattcagcccattattttggttgccgatgaaggctggacaattgtgctaaatgaatcatcacaaaaattaggtgaccatggttatgataattctttgcctagtatgcatccatttctagctgcccacggacctgcatttcacaaaggctacaagcatagcacaattaacattgtggatatttatccaatgatgtgccacatcctgggattaaaaccacatcccaataatgggacctttggtcatactaagtgcttgttagttgaccagtggtgcattaatctcccagaagccatcgcgattgttatcggttcactcttggtgttaaccatgctaacatgcctcataataatcatgcagaatagactttctgtacctcgtccattttctcgacttcagctacaagaagatgatgatgatcctttaattgggtgacatgtgctagggcttatacaaagtgtctttgattaatcacaaaactaagaatacatccaaagaatagtgttgtaactatgaaaaagaatactttgaaagacaaagaacttagactaagcatgttaaaattattactttgttttccttgtgttttgtttcggtgcatttgctaataagataacgctgaccatagtaaaattgttagtaaatcattaggtaacatcttgtggtaggaaatcattaggtaacatcaatcctaactagaaatactaaaaatggcttttgagaaaaatacttcctctgcttgtattttgcgatgaagatgtgatacatctttaaatgaaaatataccaaaatttagtaggcatgtttttctaataaatttatatatttgtaaagaaaacaacagaaatctttatgcaatttgtgaattttgtatattagggaggaaaagcttcctatatttttatatttacctttaattagtttgtatctcaagtaccctcttgaggtaggaaatgctctgtgatggtaaataaaattggagcagacagaaaagatatagcaaatgaagaaatattttaaggaaacctatttgaaaaaaaaagcaaagaccatttgataaaagcctgagttgtcaccattatgtcttaagctgttagtcttaaagattattgttaaaaaattcagaagaaaagagagacaagtgctcttctctctatctatgcttaatgcctttatgtaagttacttagttgtttgcgtgtgcctgtgcaagtgtgtttgtgtgtggttgtgtggacattatgtgatttactatataaggaggtcagagatggactgtggccaggcttccacattcctgaagcacacagatctcaggaaaggttatttttgcacttcatatttgtttactttctcctaactcacaagttaaaatcataacttaatttcattaacttttatcatttaactctctcatgtttgttgtaacctgaggtatccaaatgctacagaaaaatttatgacccaaatacaaatctcaatttgactgggacagaatgaggaatggagatttttgtatttatctttgggactttatgccttactttttaggctatagaatagttaagaaattttaaacaaaatttagtatcttttggtctttcacaccattcatatgttaagtggcagaatagccttagtgctacctccactttttttctccagtatttgcatcacagaaataatccctctgtttaacatgtttgttcagagccaagggtttattgtgaagaactgtcatcctgcctttgctagctggtaccttctagtaatcaaaattaatatgaagaaactaggttgtgacagactagattatatttagtaggggaaaaattgggctcaagaaccattcatcagtacgtgagacaagcagttaatagtatgatctttaaagttttgacaatataaaataaacttggtaactgttttacaaatataaaagtataataaatatgcagcccagttaaatattgattatctgtgatggtaaagaacaacagtggtgccagtcatcaaacatacagtgcgtcctattgagtcactgctaatttcttgagcctggtatttgctgcctattgtatttgtggttgttgagaggcattttcaaaccctgtataaataatccatgctgttggtcataagttaactgtattaagaacagtaaaataaataaaaaccaatagtactaattttgctttaaaaaaatttctaatttttttcacataaaacaattatcctaaaggttaatagttgatcgaaacagaataatagaaaaattctactttaatttccattaaaaagcaaatagcattgacacatttaaagcttttcatttaaagtagtggatgtttttgaagtatctaaaatagtagcagaatattttatacttggtccttgcaatggtgtgagttttaatgattgcattatcgtgattggtggttatgagtttcagaaatctatacttggcatccaactcatgagtggattttatataggatggaacaggaaggtatgtcctgtcagtatcttaaccctttcaacaagacatttacctatttgtctttccttacgttctcaaaatattaactcgaattgtaaattaagcaaaaatttaaaaagtatatgttgatgggacaagaagaatagtatttatttaataaaacatatattatattgaactatgtgttaattcatttgtatcttttaaaaaattatcactgttaaagccattgactcctttagtacactgagaaaaatcttatagtaaaactagcctttcacattaaggttttggtgtgtattttgttaaataactaacatgctgctctattttctgggtgtagaaagtatttggctctaggaaacatttacttgtttgtgaaaacaataccccaaggtaataggaaaagtttgagttaagtgtttttaattcagtcagtgaattcagaataagtacattcatgtataacatagggacagttctgctgctgttatttatatgcaattcttctggtaaatagcaatagaataaaacatatttcaatgtttgtgtataggttttatattattattccactaggaatggcataagaatttatagataaattcttgtaacattaaaggattaaaatgtttttacattgtttttgggtgtctccttcttgtgcccatatctgataagctttatggattattgcatttaattccttttatttggagggttttacttccttgttaacatataaagttataaatgaaggacaaggaggagatggaaaatgtgtatttattgttaattcttaaaatagtgtgtaaataaaataacatcagtgtgcttt

SEQ ID NO: 38 - DNA, 4508 bp, Homo sapiens
cgggcagcgtggaccccggatgagttgcttttaggcttgctggcccgcggggctgtccaggcacgcgaggcccctcaggtacgccctctcttccctgcaggatccggccctcaaagacgagggtcacgcacgcgttacaaccccgaaacagtagcacaagatttaatttttaaaagagcgtgtttcttcggggcttgccgttcgttcgtttccagcctcaggaatttatggtcgcctttttgaatgagcaacaaaatgcttcaacaagttccagaaaacataaattttcctgctgaagaagagaaaatcttggagttttggactgaatttaattgttttcaggaatgcttaaagcaatcaaaacataaaccaaaatttaccttctatgatggtcctccttttgcaactggactgcctcactatggacatatacttgcgggtacaattaaagatatagttacaagatatgctcaccagagtgggtttcatgttgacagaagatttggatgggattgccatggcttacctgtggaatatgaaattgataagacactgggaatcagaggaccagaggatgtggccaaaatggggattacagagtataacaatcagtgccgagcaattgtgatgagatattctgctgagtggaagtctactgttagcagacttggccgatggattgactttgacaatgactataaaactctgtatccacaattcatggaatcagtctggtgggtcttcaaacaactctatgataaaggccttgtttatagaggtgtgaaagtcatgcccttctctacggcatgtaacactccactttccaacttcgagtcacaccagaattataaggatgttcaagatccttcagtatttgtaactttccctttggaagaagatgaaactgtatctttagttgcttggacaaccactccctggactctacctagtaaccttgctgtgtgtgttaatccagaaatgcaatatgtgaaaattaaagatgttgccagaggacgattactcattttaatggaagccagattgtcagccctctataaattggagagtgactatgagatccttgaaagatttcctggtgcctatcttaaaggcaagaagtacaggcccctgtttgactatttcctgaagtgtaaagagaatggcgctttcactgtgcttgttgacaactatgtgaaggaagaagaaggcacaggggttgtccaccaagctccttacttcggtgctgaggactatcgggtctgtatggactttaacattattcggaaagactcactccctgtttgccctgtggatgcttcaggctgcttcacaacggaggtgacagatttcgcaggacagtatgtgaaggatgctgacaaaagtatcatcaggactttgaaggaacaaggccgacttctggttgccaccaccttcactcacagctaccctttttgctggagatcagacactcctctaatttacaaagcagtgcccagctggtttgtgcgagtggagaacatggtggaccagctcctaaggaacaatgacctgtgctactgggtcccagagttggtacgagaaaaacgatttggaaattggctgaaagatgcacgtgactggacaatttccagaaacagatactggggcacccccatcccactgtgggtcagcgatgactttgaggaggtggtatgcattgggtcagtggcggaacttgaagaactgtcaggagcaaagatctcagatctccacagagagagtgttgaccacctgaccattccttcacgctgtgggaagggatccttgcaccgcatctctgaagtgtttgactgttggtttgagagtggcagcatgccctatgctcaggttcattacccgtttgaaaacaagagggagtttgaggatgcttttcctgcagatttcattgccgagggcatcgaccaaaccagaggatggttttataccctgctggtgctggccacggccctctttggacaaccgcctttcaagaacgtaattgtgaatgggcttgtcctggcaagtgatggccaaaaaatgagcaaacggaaaaagaattatccagatccagtttccatcatccagaagtatggtgctgatgccctcagattatatctgattaactcccctgtggtgagagcagaaaacctccgctttaaagaagagggtgtgcgggacgtccttaaggatgtactgctcccatggtacaatgcctatcgcttcttaatccagaacgttctgaggctccagaaggaggaagaaatagaatttctctacaatgagaacacggttagagaaagccccaacattacagaccggtggatcctgtccttcatgcagtctctcattggcttctttgagactgaaatggcagcttataggctttatactgtggtgcctcgcctggtcaagtttgtagatattctgaccaattggtatgttagaatgaaccgcagaagattaaagggtgaaaatgggatggaggattgtgtcatggccctagaaaccttgtttagtgttctgctttctctttgcagacttatagctccctacacaccttttctcactgaattgatgtaccagaatctaaaggtgctgattgaccctgtttctgttcaggacaaggacacactcagcattcactacctcatgctgccccgtgttcgagaagaattgattgacaagaaaacagagagtgcagtatctcagatgcagtctgtgattgaacttggaagagtgatcagagaccgaaaaactattcccataaagtatcctttgaaagaaattgtggttatccatcaagatccagaagctcttaaagatatcaagtctttggagaagtatatcattgaggaactcaatgttcgaaaagttacactgtctacagataaaaacaagtatggcattcggctaagggcagaaccagatcacatggtcctggggaagcgtctgaagggagcctttaaggcagtgatgacgtccatcaagcagttgagcagtgaggagctggagcagttccagaagactgggaccattgttgtggaaggccatgaattgcacgatgaagacatccgcctcatgtacacctttgatcaggccacaggtgggactgcgcaatttgaagcacactcagatgctcaggctttggtcctcttagatgtcactcctgaccagtcaatggtagatgaaggaatggctcgggaagtcatcaatcgcatacagaaacttcgcaaaaagtgcaatctggttccaactgatgaaatcacagtgtactataaagcaaagtctgaaggaacatatctgaatagtgttattgaaagccacacagagttcatatttaccaccataaaggctcccttgaaaccatatccagtttctccatcggataaagtccttattcaagaaaaaacacagttgaagggatctgaactggaaattacactcaccagaggatcttcccttcctggtcctgcttgtgcatatgtcaatcttaacatttgtgcaaatggcagtgaacaaggtggagtattgctcctggaaaatccaaaaggtgacaataggttggaccttttaaagctgaagagtgttgtcactagcatttttggtgtgaaaaatacagagctggctgtcttccatgatgaaacagaaatacaaaaccaaactgacttactgagtcttagtggaaaaacactttgtgtgactgcaggatcggctccctctctgatcaacagttctagtactcttctttgtcagtatatcaacctacagctcctgaatgcaaagccacaagagtgtttaatggggacagtgggcactctcctgcttgaaaacccacttgggcagaatggactcacccaccaaggtcttctgtatgaagcagccaaggtgtttggccttcggagcaggaagctaaagctgtttctgaatgagacccaaacgcaggaaattacagaagacatccccgtgaagactttgaatatgaagactgtgtatgtttctgtgttaccaacaacagcagacttctagcatgtacttatcaatgttgttcggtcagcccttccctaattacacctatcccctacacatacatgcacatagacacacacatgaacacactgaagatatttccttcaggtgtgtgtaaaatatgctgcttggattgaaattcaaatgggattgattagtcaagtaacttgagacctcacagtaatcttcacacttaaccttagacacctatgcagtcatgttgggagcaggttacaatgttacttcagcccacagtttatttctattcttgagttcttaagtacagaagatagaagtgatttaaatggcatagtatatatatcattttctggccttttaaaatttatttgagacctcttgatgaaatggacatattatatatttctgccacctggattttcctggataatttgatggaatattttaagtttcagtaaatcagaacaataaacaaactcagatat

SEQ ID NO: 39 - DNA, 2195 bp, Homo sapiens
actctttcttcggctcgcgagctgagaggagcaggtagaggggcagaggcgggactgtcgtctgggggagccgcccaggaggctcctcaggccgaccccagaccctggctggccaggatgaagtatctccggcaccggcggcccaatgccaccctcattctggccatcggcgctttcaccctcctcctcttcagtctgctagtgtcaccacccacctgcaaggtccaggagcagccaccggcgatccccgaggccctggcctggcccactccacccacccgcccagccccggccccgtgccatgccaacacctctatggtcacccacccggacttcgccacgcagccgcagcacgttcagaacttcctcctgtacagacactgccgccactttcccctgctgcaggacgtgcccccctctaagtgcgcgcagccggtcttcctgctgctggtgatcaagtcctcccctagcaactatgtgcgccgcgagctgctgcggcgcacgtggggccgcgagcgcaaggtacggggtttgcagctgcgcctcctcttcctggtgggcacagcctccaacccgcacgaggcccgcaaggtcaaccggctgctggagctggaggcacagactcacggagacatcctgcagtgggacttccacgactccttcttcaacctcacgctcaagcaggtcctgttcttacagtggcaggagacaaggtgcgccaacgccagcttcgtgctcaacggggatgatgacgtctttgcacacacagacaacatggtcttctacctgcaggaccatgaccctggccgccacctcttcgtggggcaactgatccaaaacgtgggccccatccgggctttttggagcaagtactatgtgccagaggtggtgactcagaatgagcggtacccaccctattgtgggggtggtggcttcttgctgtcccgcttcacggccgctgccctgcgccgtgctgcccatgtcttggacatcttccccattgatgatgtcttcctgggtatgtgtctggagcttgagggactgaagcctgcctcccacagcggcatccgcacgtctggcgtgcgggctccatcgcaacacctgtcctcctttgacccctgcttctaccgagacctgctgctggtgcaccgcttcctaccttatgagatgctgctcatgtgggatgcgctgaaccagcccaacctcacctgcggcaatcagacacagatctactgagtcagcatcagggtccccagcctctgggctcctgtttccataggaaggggcgacaccttcctcccaggaagctgagacctttgtggtctgagcataagggagtgccagggaaggtttgaggtttgatgagtgaatattctggctggcgaactcctacacatccttcaaaacccacctggtactgttccagcatcttccctggatggctggaggaactccagaaaatatccatcttctttttgtggctgctaatggcagaagtgcctgtgctagagttccaactgtggatgcatccgtcccgtttgagtcaaagtcttacttccctgctctcacctactcacagacgggatgctaagcagtgcacctgcagtggtttaatggcagataagctccgtctgcagttccaggccagccagaaactcctgtgtccacatagagctgacgtgagaaatatctttcagcccaggagagaggggtcctgatcttaaccctttcctgggtctcagacaactcagaaggttggggggataccagagaggtggtggaataggaccgccccctccttacttgtgggatcaaatgctgtaatggtggaggtgtgggcagaggagggaggcaagtgtcctttgaaagttgtgagagctcagagtttctggggtcctcattaggagcccccatccctgtgttccccaagaattcagagaacagcactggggctggaatgatctttaatgggcccaaggccaacaggcatatgcctcactactgcctggagaagggagagattcaggtcctccagcagcctccctcacccagtatgttttacagattacggggggaccgggtgagccagtgaccccctgcagcccccagcttcaggcctcagtgtctgccagtcaagcttcacaggcattgtgatggggcagccttggggaatataaaattttgtgaagacttgg

SEQ ID NO: 40 - DNA, 1219 bp, Homo sapiens
gaatagtctaccccccttgcactctacctgacacagctgcagcctgcaattcactcgcactgcctgggattgcactggatccgtgtgctcagaacaaggtgaacgcccagctgcagccatgaagatctgtagcctcaccctgctctccttcctcctactggctgctcaggtgctcctggtggaggggaaaaaaaaagtgaagaatggacttcacagcaaagtggtctcagaacaaaaggacactctgggcaacacccagattaagcagaaaagcaggcccgggaacaaaggcaagtttgtcaccaaagaccaagccaactgcagatgggctgctactgagcaggaggagggcatctctctcaaggttgagtgcactcaattggaccatgaattttcctgtgtctttgctggcaatccaacctcatgcctaaagctcaaggatgagagagtctattggaaacaagttgcccggaatctgcgctcacagaaagacatctgtagatattccaagacagctgtgaaaaccagagtgtgcagaaaggattttccagaatccagtcttaagctagtcagctccactctatttgggaacacaaagcccaggaaggagaaaacagagatgtcccccagggagcacatcaaaggcaaagagaccaccccctctagcctagcagtgacccagaccatggccaccaaagctcccgagtgtgtggaggacccagatatggcaaaccagaggaagactgccctggagttctgtggagagacttggagctctctctgcacattcttcctcagcatagtgcaggacacgtcatgctaatgaggtcaaaagagaacgggttcccttaagagatgtcatgtcgtaagtccctctgtatactttaaagctctctacagtccccccaaaatatgaacttttgtgcttagtgagtgcaacgaaatatttaaacaagttttgtattttttgcttttgtgttttggaatttgccttatttttcttggatgcgatgttcagaggctgtttcctgcagcatgtatttccatggcccacacagctatgtgtttgagcagcgaagagtctttgagctgaatgagccagagtgataatttcagtgcaacgaactttctgctgaattaatggtaataaaactctgggtgtttttcagaaatacattcaaaaaaaaaaaaaaaaaaaaaaaaaaaaaaaaaaaaaaaa

SEQ ID NO: 41 - DNA, 1876 bp, Homo sapiens
gagccatgctcgcggcgatgggctctctggcggctgccctctgggcagtggtccatcctcggactctcctactgggcactgtcgcctttctgctcgctgctgactttctcaaaagacggcgcccaaagaactacccgccggggccctggcgcctgcccttccttggcaacttcttccttgtggacttcgagcagtcgcacctggaggttcagctgtttgtgaagaaatatgggaacctttttagcttggagcttggtgacatatctgcagttcttattactggcttgcccttaatcaaagaagcccttatccacatggaccaaaactttgggaaccgccccgtgacccctatgcgagaacatatctttaagaaaaatggattgattatgtcaagtggccaggcatggaaggagcaaagaaggttcactctgacagcactaaggaactttggtttaggaaagaagagcttagaggaacgcattcaggaggaggcccaacacctcactgaagcaataaaagaggagaacggacagccttttgaccctcatttcaagatcaacaatgcagtttccaatatcatttgctccatcaccttcggagaacgctttgagtaccaggatagttggtttcagcagctgctgaagttactagatgaagtcacatacttggaggcttcaaagacatgccagctctacaatgtctttccatggataatgaaattcctgcctggaccccaccaaactctcttcagcaactggaaaaaactgaaattgtttgtttctcatatgattgacaaacacagaaaggattggaatcctgcagaaacaagagactttattgatgcttaccttaaagaaatgtcaaagcacacaggcaatcctacttcaagtttccatgaagaaaacctcatctgcagcaccctggacctcttctttgccggaaccgagacaacttccacaactctgcgatgggctctgctttatatggccctctacccagaaatccaagaaaaagtacaagctgagattgacagagtgattggccaggggcagcagccgagcacagccgcccgggagtccatgccctacaccaatgctgtcatccatgaggtgcagagaatgggcaacatcatccccctgaacgttcccagggaagtgacagttgataccactttggctgggtaccacctgcccaagggtaccatgatcctgaccaatttgacggcgctgcacagggaccccacagagtgggccacccctgacacattcaatccggaccattttctggagaatggacagtttaagaaaagggaagcctttatgcctttctcaataggaaagcgggcatgcctcggagaacagttggccaggactgagctgtttattttcttcacttcccttatgcaaaaatttaccttcaggcccccaaacaatgagaagctgagcctgaagtttagaatgggtatcaccatttccccagtcagtcaccgcctctgcgctgttcctcaggtgtaatattgttaagaaagaaaggggcaaggaaagtaagaagacatggcacgtgttctgaaaccactggtgtctgctcagatgtgttgggacaaaatgaaagtgactttcaagaaagatcagaggaatttgactcagagaaaactagatccaaatcccagctctactgtctcgtccgaattagccttgggaaaatcatttatatgctaaataatttacctttttatctaggagatgaaaagaggataatgtttccttccataaagaaagttcttgtaagaatcaaaagaaatggtgagctttaagtggtttgtaaaccataaaacacatcataaaagttctatctataaaaaaaaaaaaaaaaaaaa

SEQ ID NO: 42 - DNA, 4541 bp, Homo sapiens
ggatcctctagggtcccagctcgcctcgatggagctcctcccgccgctgcctcagtccttcctgttgctgctgctgttgcctgccaagcccgcggcgggcgaggactggcagtgcccgcgcaccccctacgcggcctctcgcgactttgacgtgaagtacgtggtgcccagcttctccgccggaggcctggtacaggccatggtgacctacgagggcgacagaaatgagagtgctgtgtttgtagccatacgcaatcgcctgcatgtgcttgggcctgacctgaagtctgtccagagcctggccacgggccctgctggagaccctggctgccagacgtgtgcagcctgtggcccaggaccccacggccctcccggtgacacagacacaaaggtgctggtgctggatcccgcgctgcctgcgctggtcagttgtggctccagcctgcagggccgctgcttcctgcatgacctagagccccaagggacagccgtgcatctggcagcgccagcctgcctcttctcagcccaccataaccggcccgatgactgccccgactgtgtggccagcccattgggcacccgtgtaactgtggttgagcaaggccaggcctcctatttctacgtggcatcctcactggacgcagccgtggctggcagcttcagcccacgctcagtgtctatcaggcgtctcaaggctgacgcctcgggattcgcaccgggctttgtggcgttgtcagtgctgcccaagcatcttgtctcctacagtattgaatacgtgcacagcttccacacgggagccttcgtatacttcctgactgtacagccggccagcgtgacagatgatcctagtgccctgcacacacgcctggcacggcttagcgccactgagccagagttgggtgactatcgggagctggtcctcgactgcagatttgctccaaaacgcaggcgccggggggccccagaaggcggacagccctaccctgtgctgcaggtggcccactccgctccagtgggtgcccaacttgccactgagctgagcatcgccgagggccaggaagtactatttggggtctttgtgactggcaaggatggtggtcctggcgtgggccccaactctgtcgtctgtgccttccccattgacctgctggacacactaattgatgagggtgtggagcgctgttgtgaatccccagtccatccaggcctccggcgaggcctcgacttcttccagtcgcccagtttttgccccaacccgcctggcctggaagccctcagccccaacaccagctgccgccacttccctctgctggtcagtagcagcttctcacgtgtggacctattcaatgggctgttgggaccagtacaggtcactgcattgtatgtgacacgccttgacaacgtcacagtggcacacatgggcacaatggatgggcgtatcctgcaggtggagctggtcaggtcactaaactacttgctgtatgtgtccaacttctcactgggtgacagtgggcagcccgtgcagcgggatgtcagtcgtcttggggaccacctactctttgcctctggggaccaggttttccaggtacctatccgaggccctggctgccgccacttcctgacctgtgggcgttgcctaagggcatggcatttcatgggctgtggctggtgtgggaacatgtgcggccagcagaaggagtgtcctggctcctggcaacaggaccactgcccacctaagcttactgagttccacccccacagtggacctctaaggggcagtacaaggctgaccctgtgtggctccaacttctaccttcacccttctggtctggtgcctgagggaacccatcaggtcactgtgggccaaagtccctgccggccactgcccaaggacagctcaaaactcagaccagtgccccggaaagactttgtagaggagtttgagtgtgaactggagcccttgggcacccaggcagtggggcctaccaacgtcagcctcaccgtgactaacatgccaccgggcaagcacttccgggtagacggcacctccgtgctgagaggcttctctttcatggagccagtgctgatagcagtgcaacccctctttggcccacgggcaggaggcacctgtctcactcttgaaggccagagtctgtctgtaggcaccagccgggctgtgctggtcaatgggactgagtgtctgctagcacgggtcagtgaggggcagcttttatgtgccacaccccctggggccacggtggccagtgtcccccttagcctgcaggtggggggtgcccaggtacctggttcctggaccttccagtacagagaagaccctgtcgtgctaagcatcagccccaactgtggctacatcaactcccacatcaccatctgtggccagcatctaacttcagcatggcacttagtgctgtcattccatgacgggcttagggcagtggaaagcaggtgtgagaggcagcttccagagcagcagctgtgccgccttcctgaatatgtggtccgagacccccagggatgggtggcagggaatctgagtgcccgaggggatggagctgctggctttacactgcctggctttcgcttcctacccccaccccatccacccagtgccaacctagttccactgaagcctgaggagcatgccattaagtttgagtatattgggctgggcgctgtggctgactgtgtgggtatcaacgtgaccgtgggtggtgagagctgccagcacgagttccggggggacatggttgtctgccccctgcccccatccctgcagcttggccaggatggtgccccattgcaggtctgcgtagatggtgaatgtcatatcctgggtagagtggtgcggccagggccagatggggtcccacagagcacgctccttggtatcctgctgcctttgctgctgcttgtggctgcactggcgactgcactggtcttcagctactggtggcggaggaagcagctagttcttcctcccaacctgaatgacctggcatccctggaccagactgctggagccacacccctgcctattctgtactcgggctctgactacagaagtggccttgcactccctgccattgatggtctggattccaccacttgtgtccatggagcatccttctccgatagtgaagatgaatcctgtgtgccactgctgcggaaagagtccatccagctaagggacctggactctgcgctcttggctgaggtcaaggatgtgctgattccccatgagcgggtggtcacccacagtgaccgagtcattggcaaaggccactttggagttgtctaccacggagaatacatagaccaggcccagaatcgaatccaatgtgccatcaagtcactaagtcgcatcacagagatgcagcaggtggaggccttcctgcgagaggggctgctcatgcgtggcctgaaccacccgaatgtgctggctctcattggtatcatgttgccacctgagggcctgccccatgtgctgctgccctatatgtgccacggtgacctgctccagttcatccgctcacctcagcggaaccccaccgtgaaggacctcatcagctttggcctgcaggtagcccgcggcatggagtacctggcagagcagaagtttgtgcacagggacctggctgcgcggaactgcatgctggacgagtcattcacagtcaaggtggctgactttggtttggcccgcgacatcctggacagggagtactatagtgttcaacagcatcgccacgctcgcctacctgtgaagtggatggcgctggagagcctgcagacctatagatttaccaccaagtctgatgtgtggtcatttggtgtgctgctgtgggaactgctgacacggggtgccccaccataccgccacattgacccttttgaccttacccacttcctggcccagggtcggcgcctgccccagcctgagtattgccctgattctctgtaccaagtgatgcagcaatgctgggaggcagacccagcagtgcgacccaccttcagagtactagtgggggaggtggagcagatagtgtctgcactgcttggggaccattatgtgcagctgccagcaacctacatgaacttgggccccagcacctcgcatgagatgaatgtgcgtccagaacagccgcagttctcacccatgccagggaatgtacgccggccccggccactctcagagcctcctcggcccacttgacttagttcttgggctggacctgcttagctgccttgagctaaccccaaggctgcctctgggccatgccaggccagagcagtggccctccaccttgttcctgccctttaactttcagaggcaataggtaaatgggcccattaggtccctcactccacagagtgagccagtgagggcagtcctgcaacatgtatttatggagtgcctgctgtggaccctgtcttctgggcacagtggactcagcagtgaccacaccaacactgacccttgaaccaataaaggaacaaatgactattaaagcacaaaaaaaaaa

SEQ ID NO: 43 - DNA, 720 bp, Homo sapiens
ggttcctgtgtgaccctgggcagttccttacctccctggtccccgtttgtcaaagaggatggactaaatgatctctgaaagtgttgaagcgcggacccttctgggtccaggaggggtccctgcaaaactccaggcaggacttctcaccagcagtcgtggggaacggaggaggacatggggaggttgtggggcctcaggctccgggcaccagggccaacctcaggctcctaaagagacattttccgcccactcctgggacactccgtctgctccaatgactgagcagcatccaccccaccccatctttgctgccagctctcaggaccgtgccctcgtcagctgggatgtgaagtctctgggtggaagtgtgtgccaagagctactcccacagcagccccaggagaaggggctttgtgaccagaaagcttcatccacagccttgcagcggctcctgcaaaaggaggtgaaagtccctgcctcaggccaagggaccaggtttgcaggagcccccctagtggtatggggctgagccctcctgagggccggttctaaggctcagactgggcactgggcctcagcctgctttcctgcagagtcgccaagcagacagccctggaaatgcctgactcagtgaacagtgcctgtgagcattgggggccaggaacggtctggtatacatggtgactcagcatcacccactttaagaaagaaaaaaacggc

SEQ ID NO: 44 - DNA, 1167 bp, Homo sapiens
ctggaaaatatgaggggccacccctctctgctgctgctatatatggcattaaccacctgcctggatacttcacccagtgaggagacagaccaagaagtcttcctgggtcccccagaggcccagagcttcctgagtagccatacccggattccaagagccaaccactgggacctggagctgctcacaccagggaacctggaacgggagtgtctggaagagaggtgttcctgggaagaggccagggagtattttgaggacaacactctcacggagcgcttttgggagagctacatctacaatggcaaaggagggcgtggacgagtggatgtggccagcctggctgtggggctgacaggtggcatcctgctcattgtcctggccggcctgggagccttttggtatctgcgctggcgacagcaccgaggccagcagccctgtccccaagaggccgggctcattagccctctgagtcctttgaaccctctgggcccaccgacgcccctgcctccacccccacccccacccccaggcctccccacctatgagcaggcgctggcagcctctggggtacacgacgcacctccacccccctacaccagcctcaggaggcctcactgaagagctgctttcgagacccggctctccgaaccgtgcccctgattcataccggattccggaagccgctaggcctcatagacgccgaagctggacttggagtggggaatggtgggagtaggggtcatccggcccgaggctgccctggcacacgcgtttccgccgcgtatggatatacacatgttttcggcaacgtgttcccgtgtcctggcccctcacgggcccccacactctcctgaccgtgagggcactggtcagttccgcccccgtggtaggcagacgcgcggggaaattcggacccaggagcccagccccggctgtgccatcttgtgtatgggcagatatgacctgacagccccctccagtgccacagggtacgcacacgcagagccccgcctgtgcacacgcgtgtcttcgtgcactccccgtgcggtacaggggcacttcgtaacccagggaaagggcggggggcatatttgcaagcgcgctcggtgcgggcaggctcgcattgcacccagggagctggagttgagctgttcccctaaataaaaa

SEQ ID NO: 45 - DNA, 2374 bp, Homo sapiens
acctggtgcgggaggcccgggcagggagaagtgtgcggggccgggacaagccggctccgagtgcggggcgggaggggcctgcgcggcggcgggagcccagagccgcgctaaagcgggtcaagcgtcctccttttctccccgccccttctcctcctcctacctgggcctctgcgtggagacgcgcacctggcaaccggaggccgcgtctccgccttctctgctcgcgcctggcgcccggagcctgcccgggacctccgccggagccgcgctcgctgcaggcggcctcgagcgctctctcgttgatgccgttttggaggtgaccggcgcggcggccgctctatggtggggccgcgttagtggctgcggctccgcgggactccagggcgcggctgcgaggtggcggggcgccccgcctgcagaaccctgcttgcagctcaggtttcggggtgcttgaggaggccgccacggcagcgcgggagcggaagatgttggagctgaggcaccggggaagctgccccggccccagggaagcggtgtcgccgccacaccgcgagggagaggcggccggcggcgaccacgaaaccgagagcaccagcgacaaagaaacagatattgatgacagatatggagatttggattccagaacagattctgatattccggaaattccaccatcctcagatagaacccctgagattctcaaaaaagctctatctggtttatcttcaaggtggaaaaactggtggatacgtggaattctcactctaactatgatctcgttgtttttcctgatcatctatatgggatccttcatgctgatgcttcttgttctgggcatccaagtgaaatgcttccatgaaattatcactataggttatagagtctatcattcttatgatctaccatggtttagaacactaagttggtactttctattgtgtgtaaactactttttctatggagagactgtagctgattattttgctacatttgttcaaagagaagaacaacttcagttcctcattcgctaccatagatttatatcatttgccctctatctggcaggtttctgcatgtttgtactgagtttggtgaagaaacattatcgtctgcagttttatatgttcgcatggactcatgtcactttactgataactgtcactcagtcacaccttgtcatccaaaatctgtttgaaggcatgatatggttccttgttccaatatcaagtgttatctgcaatgacataactgcttacctttttggatttttttttgggagaactccattaattaagttgtctcctaaaaagacttgggaaggattcattggtggtttcttttccacagttgtgtttggattcattgctgcctatgtgttatccaaataccagtactttgtctgcccagtggaataccgaagtgatgtaaactccttcgtgacagaatgtgagccctcagaacttttccagcttcagacttactcacttccaccctttctaaaggcagtcttgagacaggaaagagtgagcttgtaccctttccagatccacagcattgcactgtcaacctttgcatctttaattggcccatttggaggcttctttgctagtggattcaaaagagccttcaaaatcaaggattttgcaaataccattcctggacatggtgggataatggacagatttgattgtcagtatttgatggcaacttttgtacatgtgtacatcacaagttttatccggggcccaaatcccagcaaagtgctacagcagttgttggtgcttcaacctgaacagcagttaaatatatataaaaccctgaagactcatctcattgagaaaggaatcctacaacccaccttgaaggtataactggatccagagagggaaggactgacaagaaggaattattcagaaaaacactgacagatgttttataaattgtacagaaaaatagttaaaaatgcaataggttgaagttttggagatatgtttctctctgaaattactgtgaatatttaacaaacacttacttgatctatgttatgaaataagtagcaaattgccagcaaaatgtcttgtaccttttctaaagtgtattttctgatgtgaacttccttccccttacttgctaggtttcataatttaaaagagtcaaacactataaaatgagtaagttgacgatgttttaagattgcacctggcagtgtgcctttttgcacaaatatttacttttgcacttggagctgcttttaattttagcaaaatgttttatgcaaggcacaataggaagtcagttctcctgcacttcctcctcatgtagtctggagtactttctaaagggcttagttggatttaaaaaaaaaaaaaaaaaa

SEQ ID NO: 46 - DNA, 963 bp, Homo sapiens
gacacgaagcctcccgggtggcttacagacgctgccagcatcgccgccgccagaggagaaatgtctgaagtaagacccctctccagagacatcttgatggagaccctcctgtatgagcagctcctggaacccccgaccatggaggttcttggcatgactgactctgaagaggacctggaccctatggaggacttcgattctttggaatgcatggagggcagtgacgcattggccctgcggctggcctgcatcggggacgagatggacgtgagcctcagggccccgcgcctggcccagctctccgaggtggccatgcacagcctgggtctggctttcatctacgaccagactgaggacatcagggatgttcttagaagtttcatggacggtttcaccacacttaaggagaacataatgaggttctggagatccccgaaccccgggtcctgggtgtcctgcgaacaggtgctgctggcgctgctgctgctgctggcgctgctgctgccgctgctcagcgggggcctgcacctgctgctcaagtgaggccccggcggctcagggcggggctggccccacccccatgaccactgccctggaggtggcggcctgctgctgttatctttttaactgttttctcatgatgcctttttatatttaaaccccgagatagtgctggaacactgctgaggttttatactcaggttttttgttttttttttattccagttttcgttttttctaaaagatgaattcctatggctctgcaattgtcaccggttaactgtggcctgtgcccaggaagagccattcactcctgcccctgcccacacggcaggtagcagggggagtgctggtcacacccctgtgtgatatgtgatgccctcggcaaagaatctactggaatagattccgaggagcaggagtgctcaataaaatgttggtttccagcaaaaaaaaaaaaaa

SEQ ID NO: 47 - DNA, 1408 bp, Homo sapiens
ctctcgagcctgctgcctgctcccccgccccaccagccatggtggtttctggagcgcccccagccctgggtgggggctgtctcggcaccttcacctccctgctgctgctggcgtcgacagccatcctcaatgcggccaggatacctgttcccccagcctgtgggaagccccagcagctgaaccgggttgtgggcggcgaggacagcactgacagcgagtggccctggatcgtgagcatccagaagaatgggacccaccactgcgcaggttctctgctcaccagccgctgggtgatcactgctgcccactgtttcaaggacaacctgaacaaaccatacctgttctctgtgctgctgggggcctggcagctggggaaccctggctctcggtcccagaaggtgggtgttgcctgggtggagccccaccctgtgtattcctggaaggaaggtgcctgtgcagacattgccctggtgcgtctcgagcgctccatacagttctcagagcgggtcctgcccatctgcctacctgatgcctctatccacctccctccaaacacccactgctggatctcaggctgggggagcatccaagatggagttcccttgccccaccctcagaccctgcagaagctgaaggttcctatcatcgactcggaagtctgcagccatctgtactggcggggagcaggacagggacccatcactgaggacatgctgtgtgccggctacttggagggggagcgggatgcttgtctgggcgactccgggggccccctcatgtgccaggtggacggcgcctggctgctggccggcatcatcagctggggcgagggctgtgccgagcgcaacaggcccggggtctacatcagcctctctgcgcaccgctcctgggtggagaagatcgtgcaaggggtgcagctccgcgggcgcgctcaggggggtggggccctcagggcaccgagccagggctctggggccgccgcgcgctcctagggcgcagcgggacgcggggctcggatctgaaaggcggccagatccacatctggatctggatctgcggcggcctcgggcggtttcccccgccgtaaataggctcatctacctctacctctgggggcccggacggctgctgcggaaaggaaaccccctccccgacccgcccgacggcctcaggccccgcctccaaggcatcaggccccgcccaacggcctcatgtccccgcccccacgacttccggccccgccccgggccccagcgcttttgtgtatataaatgttaatgatttttataggtatttgtaaccctgcccacatatcttatttattcctccaatttcaataaattatttattctccaaaaaaaaaaaaaaaaaaaaaaaaaataaaaaaaaaaacaaaaaaaaaaaaaaa

SEQ ID NO: 48 - DNA, 3600 bp, Homo sapiens
gaatcaacagaatttgtctttttgtgactggtttatttcacttaacttcatcctcaaggttcaacttaaaggtgtatccatgttgtagcacgtgtcagcattttctttcgttctcaggctaaatagtatttcattgtgtgtgtacaccatgtttcatgcattcattcatcccttgaaagattggtgggttgtttcctcctttttgcttttgtgaacagtgctacgaacatggttgtacaaacatctcttggagccccactagcagttcctttgggtatataccccaaagtggaattgctggatctggtagctccctttttaattttttgaggaatcgccacacagtttccataacagctgcaccattttacattcccaagaccttttttttttttttttttttaagaagaaaagatgtgtttctgcatttctggaagtctatgctgcatttccatttgttgaaatttaagaccagagtcatcttttctgctgtaattataatggtcactggcttgtgccttttcctcctctctctgccccatctgcacggggtctttgaacaagtcccagcaccttggtggacaagcctgtgtccctggcccatcatggaagccgctgcctttcagagtgggagtctgtaccctgttgcctcattccttgctgcgcccatgagtgagcttgtgcctgacctctccttccaggtggacttacacactgggctgtcggagttctcggtgacgcagcgccggctggcccatggctggaatgagtttgttgctgacaacagcgaacctgtgtggaagaaatacctggatcagtttaagaaccccctgatcctgctgctgctgggctctgccctggtgagtgtcctcaccaaggagtatgaggacgccgtcagcatcgccacggcagtgcttgtcgtggtcactgtcgccttcatccaggagtacaggtcggagaaatctctggaagagctgaccaagctggttcctccagaatgtaactgcctaagagaaggaaaactccagcacctgcttgctcgagaactggttcctggtgatgtcgtatctctctcgatcggagaccggatccctgcagacatccgactcactgaggtcacggacctcttggtggatgaatccagtttcaccggggaagccgagccatgtagtaaaacagacagccccttgacaggcggtggggacctcaccaccctcagcaacatcgtcttcatggggaccctggtgcagtatgggaggggccagggggtcgtgattggaacaggggaaagctctcagttcggagaagtgtttaagatgatgcaggctgaagagacacctaaaactcctttgcagaaaagcatggacaggctaggaaagcaactgacactcttctcctttggcataatcggtctcatcatgctcattggctggtcgcaagggaaacaactcctgagtatgttcacgatcggggtcagcctggctgtggcggctattccagagggtctgcccatcgtcgtcatggtgacgctggtcctgggagtgctgcggatggccaagaagcgggtcatcgtgaagaagttacccatcgtggagactttaggttgctgcagcgttctctgttctgacaagacggggactctgactgccaatgaaatgacagtgacccagcttgtaacgtcagatgggcttcgtgccgaggtcagcggagttgggtatgacggtcaagggactgtgtgtcttctaccatccaaggaagtcattaaggaattttccaatgtctcagtgggaaagttagtggaggcgggctgtgttgccaacaatgcggtcatcagaaagaacgccgtgatggggcagcccaccgagggtgcattgatggccctggcgatgaagatggacttaagtgatattaaaaattcatatataagaaaaaaagagattccattcagttcagagcagaagtggatggcggtgaaatgcagtctgaagactgaggatcaggaagacatttacttcatgaaaggggccttggaagaggtgatccgctactgcaccatgtacaacaacgggggcatccccctgccgctgacgccccagcagaggtcattctgcctgcaggaagagaagaggatggggtcgctcggtttgcgggtgctggccctggcttctgggcccgagctggggcggctgacgtttctaggtcttgtgggcatcattgaccccccgagagttggcgtgaaggaagcagtccaggttctctccgagtctggtgtgtctgtgaagatgataacgggggatgccctggagacggccttggccataggaagaaacatcggcctgtgcaacgggaagctgcaagccatgtccggggaggaggtggacagcgtggagaagggcgagctggccgaccgcgtggggaaggtgtccgtgttcttcaggaccagcccaaagcacaagctcaaaatcatcaaggctctgcaggagtcaggggcgatcgtggccatgactggggatggggtgaacgacgcagtggccctgaagtctgcagacattgggatcgccatggggcagacagggacggacgtcagcaaagaggccgccaacatgatcctggtggatgatgacttctcagccatcatgaatgcagtggaggaaggcaagggtattttttacaacatcaaaaactttgtccgattccagctgagcacgagcatctccgccctgagtctcatcactctgtccaccgtgttcaacctgcccagccccctcaacgccatgcagatcctatggatcaacatcatcatggatgggccaccggcgcagagcttgggggtagagcccgttgacaaagacgccttcaggcagccaccacggagtgtgcgggacaccatcctcagcagagccctcatcctgaagatcctcatgtccgcggccatcatcatcagcgggaccctctttatcttctggaaggagatgcctgaagacagagcaagcactccccgcaccacgacgatgacgttcacttgttttgtgtttttcgatctcttcaacgccttgacctgccgctctcagaccaagctgatatttgagatcggctttctcaggaaccacatgttcctctactccgtcctggggtccatcctggggcagctggcggtcatttacatccccccgctgcagagggtcttccagacggagaacctgggagcgcttgatttgctgtttttaactggattggcctcatccgtcttcattttgtcagagctcctcaaactatgtgaaaaatactgttgcagccccaagagagtccagatgcaccctgaagatgtgtagtggaccgcactccgcggcaccttccctaatcatctcgatctggttgtgactgtggcccctgccgtgtctcctcgtcaggggagacttttaggaggccgcagccttccatcaccggatcagtttttcctcttaggaaagctgcaggaacctcgtgggctccagggacccaggcccacatccatccagcgttcccgctggctgtgggacagacagggaggggcctgtacagaaacaccacactgtttattaaatcacaatgatttttatt

SEQ ID NO: 49 - DNA, 2381 bp, Homo sapiens
cactgaataaactctaggttcccatttctttcagccagatcctcccagggaatcactacaggctggttagccaaaaagtcctgattttctgctcaatagaggtccttactggaaggcagcatgtccaatgttaccttgagaaaaatgtctcccacaggaaatgagatgaagagcaccactcagggaaccacacggaagcagcaggattttcacgaggtgaacaaaagaagaactttcttacaggataacagttggataaagaaacgccctgaagaagaaaaagatgaaaattacggtagggtggtgctcaaccgacataattcccatgatgcattggacaggaaagtaaatgagagagatgtgccaaaagctacaattagtcggtacagttctgatgacactttggacaggatctcagacagaaatgatgctgctaaaacatataaggccaataccttggataaccaactaaccaataggagcatgtccatgtttagatcactggaagtaacaaagttgcaacctggcggttcattgaatgccaacacctccaacaccatagcatccacttctgctactactcctgtaaagaagaagaggcagtcctggtttccaccgccccctccaggttacaatgcctcttcgagcacaggaaccaggagacgggaaccaggtgttcaccctccaatacctccaaagcccagttctcctgtttcttctcctaaccagctgagacaggataataggcagatacatccacctaaaccaggtgtatatacagaaaccaacagatctgctgaaagaaatataagtgaagaattggataatctcatcaaaatgaacaaaagcttgaataggaatcaaggtcttgatagtctcttcagagcaaatccaaaggtagaagaaagagagaaaagagccaaaagccttgaaagtctcatctatatgagtacccggacagataaagatggcaaaggaatccaaagccttggaagtccgattaaagttaatcaaaggactgacaaaaatgagaaaggaagacaaaatctcgaatctgttgctaaagtgaatgccaggatgaataaaacgagcagaagaagtgaagaccttgataatgctactgaagtaaatcccaaaggacatgaaaataccactggaaaaaaagaccttgatgggcttattaaagtggatcctgaaacaaataaaaatattacgaggggccagagccttgataatctcatcaaagtgacccctgaagtaaagagaagtaaccaaggttccaaagaccttaataacttcatcaaagtgtatccaggaacagaaaaaagtactgaagggggccaaagtctcgacagcctcattaaagtgactcctgaaagaaacagaactaaccaagggaaccaagacttggaaaatcttatcaaagtgatcccttcagcaaacaaaagcagtgaacaaggtcttgatgaacatattaatgtcagccccaaagctgtcaaaaacactgatggaaaacaagatcttgataaactcatcaaggtgaatcctgaaattttcacaaacaaccaaagaaaccaagatcttgctaacctcatcaaagtaaatcctgcagtaatcagaaacaatcagagccaagacttggaaaatcttatcaaagtgatcccttcagctcttagaaacactaatcgagaccagaacctggaaaatttaattgaagtaaattctcatgtgtctgaaaacaagaatggaagctctaacactggagccaagcaggcaggaccacaggatactgttgtgtacacaaggacatatgtggagaatagtaaatcacccaaggatggatatcaggagaatatctctggaaaatacatacaaactgtttattcaacttctgataggtctgtcattgaaagagatatgtgcacttactgccgaaaacccttgggtgtagaaactaaaatgattttagatgaattacaaatttgctgccattctacttgctttaagtgtgaaatatgcaagcagcctttggaaaatctacaagcgggtgatagtatttggatttatagacagacaatacactgtgaaccttgctactctaaaattatggcaaagtggattccataactctggcacaaggaaatcaagatgaaaagcactcattaaggaattaaagttacaagttttatcttaataatatgtaatctagaaaagctttcacattgaagatcaactcttgtacaaaattaacaattctgttattgcataagtaatctaattgtcttcaataaggtcacacacataaaaagagccatctggtctctggctagagttagcaataaaaagttcaaatggttccagaaaaaaaaaaaaaaaaaaaa

SEQ ID NO: 50 - DNA, 2393 bp, Homo sapiens
gagagagcgagacctgggagggaggggtcctccagcagaaaggggcgggggaaaaggtgcaaaagcagcgtgggagcgccgggctggcttcctgcggctgctgctggtctgactgggaagcagcaagccaccactacgaactctcaagaggagtgggagtgcgggagtccagagctgcctctgggaagtctgcagtagttgagcaaaggggtcctcacgttcctgagagctgggcaggggggattttggaacctggggcagccaagaacgagcagccaagggtacgggagattagttgtgcacagagcagtgctagtcgggcttgggggtggctggtgggcactgcgtgggaaaccttggtttgtagttttcttggtttgcgttactcctgttgggtagaattaccctccgcgcctttgtacaagacacggtgtctcctggggcaaggaaggagccaggatggcctgggctctgaagctgcctctggccgacgaagtgattgaatccgggttggtgcaggactttgatgctagcctgtccgggatcggccaggaactgggtgctggtgcctatagcatgagtgatgtccttgcattgcccatttttaagcaagaagagtcgagtttgcctcctgataatgagaataaaatcctgccttttcaatatgtgctttgtgctgctacctctccagcagtgaaactccatgatgaaaccctaacgtatctcaatcaaggacagtcttatgaaattcgaatgctagacaataggaaacttggagaacttccagaaattaatggcaaattggtgaagagtatattccgtgtggtgttccatgacagaaggcttcagtacactgagcatcagcagctagagggctggaggtggaaccgacctggagacagaattcttgacatagatatcccgatgtctgtgggtataatcgatcctagggctaatccaactcaactaaatacagtggagttcctgtgggaccctgcaaagaggacatctgtgtttattcaggtgcactgtattagcacagagttcactatgaggaaacatggtggagaaaagggggtgccattccgagtacaaatagataccttcaaggagaatgaaaacggggaatatactgagcacttacactcggccagctgccagatcaaagttttcaagcccaaaggtgcagacagaaagcaaaaaacggatagggaaaaaatggagaaacgaacacctcatgaaaaggagaaatatcagccttcctatgagacaaccatactcacagagtgttctccatggcccgagatcacgtatgtcaataactccccatcacctggcttcaacagttcccatagcagtttttctcttggggaaggaaatggttcaccaaaccaccagccagagccaccccctccagtcacagataacctcttaccaacaaccacacctcaggaagctcagcagtggttgcatcgaaatcgtttttctacattcacaaggcttttcacaaacttctcaggggcagatttattgaaattaactagagatgatgtgatccaaatctgtggccctgcagatggaatcagactttttaatgcattaaaaggccggatggtgcgtccaaggttaaccatttatgtttgtcaggaatcactgcagttgagggagcagcaacaacagcagcagcaacagcagcagaagcatgaggatggagactcaaatggtactttcttcgtttaccatgctatctatctagaagaactaacagctgttgaattgacagaaaaaattgctcagcttttcagcatttccccttgccagatcagccagatttacaagcaggggccaacaggaattcatgtgctcatcagtgatgagatgatacagaactttcaggaagaagcatgttttattctggacacaatgaaagcagaaaccaatgatagctatcatatcatactgaagtaggagtgcggcgtttcgtgcccagtggctgctccttccttcacctctgaaaacggccctcttgaagggggatatgaatggagatttgaaggtctgcaagaacctgactcgtctgactgtgtgtggaggagtccaggccatggaggcagaatcctggccctctgtgttggcccaagctcttgtggtacacacagattactgcccaatatgcagttctgcagctgttttagttaaatttctggaccttgttgttgttaaatatcagtagaaactctacataatttagagtgtatgtagggcataatgatgatgggaattgtgtgatgtttaacaggaagatcttaaattttgtgatatggagccctgtaatttttttcttatataaaaatgggtatctatattcataaaaaaaaaaaaaaaaaaaaaaa

SEQ ID NO: 51 - DNA, 1828 bp, Homo sapiens
acttctccctagagcaggggtgtttgccagcagcctgcactctcagaaatcagacttgagtggccggaacccttgagaccagaggcttaccatgctgctccctaggagggccaggaactgctgacgtgaccactggacagttattcgtgtctcttacaattaccaaacagaatggacaagcttaataaaataaccgtccccgccagtcagaagttgaggcagcttcaaaagatggtccatgatattaaaaacaatgaaggtggaataatgaataaaatcaaaaagctaaaagtcaaagcacctccaagtgttcctcgaagggactacgcttcagagagccctgctgacgaagaggagcagtggtccgatgactttgacagcgactatgaaaatccagatgagcactcggactcagagatgtacgtgatgcccgccgaggagaacgctgatgacagctacgagccgcctccagtagagcaggaaaccaggccggttcacccagccctgcccttcgccagaggcgagtatatagacaatcgatcaagccagaggcattccccacccttcagcaagacacttcccagtaagcccagctggccttcagagaaagcaaggctcacctccaccctgccggccctgactgctttgcagaaacctcaagtcccacccaaacccaaaggcctccttgaggatgaggctgattatgtggtccccgtggaagataatgatgaaaactatattcatcccacagaaagcagttcacctccacctgaaaaagctcccatggtgaatagatcaaccaagccaaattcctcaacgcccgcctctcctccaggaacagcttcaggtcgaaacagtggggcctgggaaaccaagtcacctccaccagctgcaccatccccgttgccacgggccgggaaaaaaccaacgacaccactgaagacaactccagttgcctctcaacagaatgcttcaagtgtttgtgaagaaaaacctatacctgctgaacgccaccgagggtcaagtcacagacaagaagctgtgcagtcaccagtgtttcctcctgcccagaaacaaatccaccaaaaacccatacctctgccaagatttacagaagggggaaacccaactgtggatgggcccctacccagcttttcatctaattccactatttcagaacaggaagctggcgttctctgcaagccatggtatgctggagcctgtgatcgaaagtctgctgaagaggcattgcacagatcaaacaaggatggatcatttcttattcggaaaagctctggccatgattccaaacaaccatatacactagttgtattctttaataagcgagtatataatattcctgtgcgatttattgaagcaacaaaacaatatgccttgggcagaaagaaaaatggtgaagagtactttggaagtgttgctgaaatcatcaggaatcatcaacatagtcctttggttcttattgacagtcagaataacacaaaagattccaccagactgaagtatgcagttaaagtttcataaagggggaaaaaaaagatcaataccattgcttcagacactttcccaaagtttctccttttgagaaaaagtcccaaaacttcatattttggattatgaatcatccagtaataaaatggaagatggagtcagctattgaagtggtcatccatttctttttaagaagctcatgtggacttgttctattgcctgacctgatgaactgttaatatctggtgaggttgagttatcatgctactaatattttccaaataaatatttttatttttaaaaataaaaaaaaaaaaaa

SEQ ID NO: 52 - DNA, 2397 bp, Homo sapiens
gcaagaactgaaacgaatggggattgaactgctttgcctgttctttctatttctaggaaggaatgatcacgtacaaggtggctgtgccctgggaggtgcagaaacctgtgaagactgcctgcttattggacctcagtgtgcctggtgtgctcaggagaattttactcatccatctggagttggcgaaaggtgtgataccccagcaaaccttttagctaaaggatgtcaattaaacttcatcgaaaaccctgtctcccaagtagaaatacttaaaaataagcctctcagtgtaggcagacagaaaaatagttctgacattgttcagattgcgcctcaaagcttgatccttaagttgagaccaggtggtgcgcagactctgcaggtgcatgtccgccagactgaggactacccggtggatttgtattacctcatggacctctccgcctccatggatgacgacctcaacacaataaaggagctgggctcccggctttccaaagagatgtctaaattaaccagcaactttagactgggcttcggatcttttgtggaaaaacctgtatcccctttcgtgaaaacaacaccagaagaaattgccaacccttgcagtagtattccatacttctgtttacctacatttggattcaagcacattttgccattgacaaatgatgctgaaagattcaatgaaattgtgaagaatcagaaaatttctgctaatattgacacacccgaaggtggatttgatgcaattatgcaagctgctgtgtgtaaggaaaaaattggctggcggaatgactccctccacctcctggtctttgtgagtgatgctgattctcattttggaatggacagcaaactagcaggcatcgtcattcctaatgacgggctctgtcacttggacagcaagaatgaatactccatgtcaactgtcttggaatatccaacaattggacaactcattgataaactggtacaaaacaacgtgttattgatcttcgctgtaacccaagaacaagttcatttatatgagaattacgcaaaacttattcctggagctacagtaggtctacttcagaaggactccggaaacattctccagctgatcatctcagcttatgaagaactgcggtctgaggtggaactggaagtattaggagacactgaaggactcaacttgtcatttacagccatctgtaacaacggtaccctcttccaacaccaaaagaaatgctctcacatgaaagtgggagacacagcttccttcagcgtgactgtgaatatcccacactgcgagagaagaagcaggcacattatcataaagcctgtggggctgggggatgccctggaattacttgtcagcccagaatgcaactgcgactgtcagaaagaagtggaagtgaacagctccaaatgtcaccacgggaacggctctttccagtgtggggtgtgtgcctgccaccctggccacatggggcctcgctgtgagtgtggcgaggacatgctgagcacagattcctgcaaggaggccccagatcatccctcctgcagcggaaggggtgactgctactgtgggcagtgtatctgccacttgtctccctatggaaacatttatgggccttattgccagtgtgacaatttctcctgcgtgagacacaaagggctgctctgcggaggtaacggcgactgtgactgtggtgaatgtgtgtgcaggagcggctggactggcgagtactgcaactgcaccaccagcacggactcctgcgtctctgaagatggagtgctctgcagcgggcgcggggactgtgtttgtggcaagtgtgtttgcacaaaccctggagcctcaggaccaacctgtgaacgatgtcctacctgtggtgacccctgtaactctaaacggagctgcattgagtgccacctgtcagcagctggccaagcccgagaagaatgtgtggacaagtgcaaactagctggtgcgaccatcagtgaagaagaagatttctcaaaggatggttctgtttcctgctctctgcaaggagaaaatgaatgtcttattacattcctaataactacagataatgaggggaaaaccatcattcacagcatcaatgaaaaagattgtccgaagcctccaaacattcccatgatcatgttaggggtttccctggctattcttctcatcggggttgtcctactgtgcatctggaagctactggtgtcatttcatgatcgtaaagaagttgccaaatttgaagcagaacgatcaaaagccaagtggcaaacgggaaccaatccactctacagaggatccacaagtacttttaaaaatgtaacttataaacacagggaaaaacaaaaggtagacctttccacagattgctagaactactttatgca

SEQ ID NO: 53 - DNA, 5891 bp, Homo sapiens
ccaggagagcggcgtggacgcgtgcgggcctagaggcccacgtgatccgcagggcggccgaggcaggaagctgtgagtgcgcggttgcggggtcgcattgtggctacggctttgcgtccccggcgggcagccccaggctggtccccgcctccgctctccccaccggcggggaaagcagctggtgtgggaggaaaggctccatcccccgccccctctctcccgctgttggctggcaggatcttttggcagtcctgtggcctcgctccccgcccggatcctcctgaccctgagattcgcgggtctcacgtcccgtgcacgccttgcttcggcctcagttaagcctttgtggactccaggtccctggtgagattagaaacgtttgcaaacatgtcccggatcgaaaagatgagcattctgggcgtgcggagttttggaatagaggacaaagataagcaaattatcactttcttcagcccccttacaattttggttggacccaatggggcgggaaagacgaccatcattgaatgtctaaaatatatttgtactggagatttccctcctggaaccaaaggaaatacatttgtacacgatcccaaggttgctcaagaaacagatgtgagagcccagattcgtctgcaatttcgtgatgtcaatggagaacttatagctgtgcaaagatctatggtgtgtactcagaaaagcaaaaagacagaatttaaaactctggaaggagtcattactagaacaaagcatggtgaaaaggtcagtctgagctctaagtgtgcagaaattgaccgagaaatgatcagttctcttggggtttccaaggctgtgctaaataatgtcattttctgtcatcaagaagattctaattggcctttaagtgaaggaaaggctttgaagcaaaagtttgatgagattttttcagcaacaagatacattaaagccttagaaacacttcggcaggtacgtcagacacaaggtcagaaagtaaaagaatatcaaatggaactaaaatatctgaagcaatataaggaaaaagcttgtgagattcgtgatcagattacaagtaaggaagcccagttaacatcttcaaaggaaattgtcaaatcctatgagaatgaacttgatccattgaagaatcgtctaaaagaaattgaacataatctctctaaaataatgaaacttgacaatgaaattaaagccttggatagccgaaagaagcaaatggagaaagataatagtgaactggaagagaaaatggaaaaggtttttcaagggactgatgagcaactaaatgacttatatcacaatcaccagagaacagtaagggagaaagaaaggaaattggtagactgtcatcgtgaactggaaaaactaaataaagaatctaggcttctcaatcaggaaaaatcagaactgcttgttgaacagggtcgtctacagctgcaagcagatcgccatcaagaacatatccgagctagagattcattaattcagtctttggcaacacagctagaattggatggctttgagcgtggaccattcagtgaaagacagattaaaaattttcacaaacttgtgagagagagacaagaaggggaagcaaaaactgccaaccaactgatgaatgactttgcagaaaaagagactctgaaacaaaaacagatagatgagataagagataagaaaactggactgggaagaataattgagttaaaatcagaaatcctaagtaagaagcagaatgagctgaaaaatgtgaagtatgaattacagcagttggaaggatcttcagacaggattcttgaactggaccaggagctcataaaagctgaacgtgagttaagcaaggctgagaaaaacagcaatgtagaaaccttaaaaatggaagtaataagtctccaaaatgaaaaagcagacttagacaggaccctgcgtaaacttgaccaggagatggagcagttaaaccatcatacaacaacacgtacccaaatggagatgctgaccaaagacaaagctgacaaagatgaacaaatcagaaaaataaaatctaggcacagtgatgaattaacctcactgttgggatattttcccaacaaaaaacagcttgaagactggctacatagtaaatcaaaagaaattaatcagaccagggacagacttgccaaattgaacaaggaactagcttcatctgagcagaataaaaatcatataaataatgaactaaaaagaaaggaagagcagttgtccagttacgaagacaagctgtttgatgtttgtggtagccaggattttgaaagtgatttagacaggcttaaagaggaaattgaaaaatcatcaaaacagcgagccatgctggctggagccacagcagtttactcccagttcattactcagctaacagacgaaaaccagtcatgttgccccgtttgtcagagagtttttcagacagaggctgagttacaagaagtcatcagtgatttgcagtctaaactgcgacttgctccagataaactcaagtcaacagaatcagagctaaaaaaaaaggaaaagcggcgtgatgaaatgctgggacttgtgcccatgaggcaaagcataattgatttgaaggagaaggaaataccagaattaagaaacaaactgcagaatgtcaatagagacatacagcgcctaaagaacgacatagaagaacaagaaacactcttgggtacaataatgcctgaagaagaaagtgccaaagtatgcctgacagatgttacaattatggagaggttccagatggaacttaaagatgttgaaagaaaaattgcacaacaagcagctaagctacaaggaatagacttagatcgaactgtccaacaagtcaaccaggagaaacaagagaaacagcacaagttagacacagtttctagtaagattgaattgaatcgtaagcttatacaggaccagcaggaacagattcaacatctaaaaagtacaacaaatgagctaaaatctgagaaacttcagatatccactaatttgcaacgtcgtcagcaactggaggagcagactgtggaattatccactgaagttcagtctttgtacagagagataaaggatgctaaagagcaggtaagccctttggaaacaacattggaaaagttccagcaagaaaaagaagaattaatcaacaaaaaaaatacaagcaacaaaatagcacaggataaactgaatgatattaaagagaaggttaaaaatattcatggctatatgaaagacattgagaattatattcaagatgggaaagacgactataagaagcaaaaagaaactgaacttaataaagtaatagctcaactaagtgaatgcgagaaacacaaagaaaagataaatgaagatatgagactcatgagacaagatattgatacacagaagatacaagaaaggtggctacaagataaccttactttaagaaaaagaaatgaggaactaaaagaagttgaagaagaaagaaaacaacatttgaaggaaatgggtcaaatgcaggttttgcaaatgaaaagtgaacatcagaagttggaagagaacatagacaatataaaaagaaatcataatttggcattagggcgacagaaaggttatgaagaagaaattattcattttaagaaagaacttcgagaaccacaatttcgggatgctgaggaaaagtatagagaaatgatgattgttatgaggacaacagaacttgtgaacaaggatctggatatttattataagactcttgaccaagcaataatgaaatttcacagtatgaaaatggaagaaatcaataaaattatacgtgacctgtggcgaagtacctatcgtggacaagatattgaatacatagaaatacggtctgatgccgatgaaaatgtatcagcttctgataaaaggcggaattataactaccgagtggtgatgctgaagggagacacagccttggatatgcgaggacgatgcagtgctggacaaaaggtattagcctcactcatcattcgcctggccctggctgaaacgttctgcctcaactgtggcatcattgccttggatgagccaacaacaaatcttgaccgagaaaacattgaatctcttgcacatgctctggttgagataataaaaagtcgctcacagcagcgtaacttccagcttctggtaatcactcatgatgaagattttgtggagcttttaggacgttctgaatatgtggagaaattctacaggattaaaaagaacatcgatcagtgctcagagattgtgaaatgcagtgttagctccctgggattcaatgttcattaaaaatatccaagatttaaatgccatagaaatgtaggtcctcagaaagtgtataataagaaacttatttctcatatcaacttagtcaataagaaaatatattctttcaaaggaacattgtgtctaggattttggatgttgagaggttctaaaatcatgaaacttgtttcactgaaaattggacagattgcctgtttctgatttgctgctcttcatcccattccaggcagcctctgtcaggccttcagggttcagcagtacagccgagactcgactctgtgcctccctccccagtgcaaatgcatgcttcttctcaaagcactgttgagaaggagataattactgccttgaaaatttatggttttggtatttttttaaatcatagttaaatgttacctctgaatttacttccttgcatgtggtttgaaaaactgagtattaatatctgaggatgaccagaaatggtgagatgtatgtttggctctgcttttaactttataaatccagtgacctctctctctgggacttggtttccccaactaaaatttgaagtagttgaatggggtctcaaagtttgacaggaaccttaagtaatcatctaagtcagtacccaccaccttcttctcctacatatcccttccagatggtcatccagactcagagctctctctacagagaggaaattctccactgtgcacacccacctttggaaagctctgaccacttgaggcctgatctgcccatcgtgaagaagcctgtaacactcctctgcgtctatcctgtgtagcatactggcttcaccatcaatcctgattcctctctaagtgggcattgccatgtggaaggcaagccaggctcactcacagagtcaaggcctgctccctgtagggtccaaccagacctggaagaacaggcctctccatttgctcttcagatgccacttctaagaaaagcctaatcacagtttttcctggaattgccagctgacatcttgaatccttccattccacacagaatgcaaccaagtcacacgcttttgaattatgctttgtagagttttgtcattcagagtcagccaggaccataccgggtcttgattcagtcacatggcatggttttgtgccatctgtagctataatgagcatgtttgcctagacagcttttctcaactgggtccagaagagaattaagccctaaggtcctaaggcatctatctgtgctaggttaaatggttggcccccaaagatagacaggtcctgatttctagaacccgtgactgttactttatacagcaaaggaaactttgcagatgtgattaaagctaaggaccttaagacagagtatcctgggggtggtggtggggtgggggggggtcctaaatgtaatcacgagtaagattaagagcaaatcaattctagtcatatattaaacatccacaataaccaagatatttttatcccaagaatgcaagatttcagaaaatgaaaaatctgttgataaatccatcactataataaaaccgaaggtgaaaaaaattctgaaaaaaaaaaaaaaaaaaaaaaaaaaaa

SEQ ID NO: 54 - DNA, 1900 bp, Homo sapiens
gcggccgcggaggaggaggaaggggaggagggcgaggcgggaggtgcaggagggaccctcgccatgggtccacgggcctagagtggcggaagataccggcctggtgccaaactggctactgctgcttcctgtggcctccatggctgaggactggctggactgcccggccctgggccctggctggaagcgccgcgaagtctttcgcaagtcaggggccacctgtggacgctcagacacctattaccagagccccacaggagacaggatccgaagcaaagttgagctgactcgatacctgggccctgcgtgtgatctcaccctcttcgacttcaaacaaggcatcttgtgctatccagcccccaaggcccatcccgtggcggttgccagcaagaagcgaaagaagccttcaaggccagccaagactcggaaacgtcaggttggaccccagagtggtgaggtcaggaaggaggccccgagggatgagaccaaggctgacactgacacagccccagcttcattccctgctcctgggtgctgtgagaactgtggaatcagcttctcaggggatggcacccaaaggcagcggctcaaaacgttgtgcaaagactgtcgagcacagagaattgccttcaaccgggaacagagaatgtttaagcgtgtgggctgtggggagtgtgcagcctgccaggtaacagaagactgtggggcctgctccacctgcctcctgcagctgccccatgatgtggcatcggggctgttctgcaagtgtgaacggagacgctgcctccggattgtggaaaggagccgagggtgtggagtatgccggggctgtcagacccaagaggattgtggccattgccccatctgccttcgccctccccgccctggtctcaggcgccagtggaaatgtgtccagcgacgttgcctacggggtaaacatgcccgccgcaagggaggctgtgactccaagatggctgccaggcggcgccccggagcccagccactgcctccaccacccccatcacagtccccagagcccacagagccgcagccctacacgaaccgccggcagaaccgcaagtgcggggcctgtgcagcctgcctacggcggatggactgtggccgctgcgacttctgctgcgacaagcccaaattcgggggcagcaaccagaagcgccagaagtgtcgttggcgccaatgcctgcagtttgccatgaagcggctgctgcccagtgtctggtcagagtctgaggatggggcaggatcgcccccaccttaccgtcgtcgaaagaggcccagctctgcccgacggcaccatcttggccctaccttgaagcccaccttggctacacgcacagcccaaccagaccatacccaggctccaacgaagcaggaagcaggtggtggctttgtgctgcccccgcctggcactgaccttgtgtttttacgggaaggcgcaagcagtcctgtgcaggtgccgggccctgttgcagcttccacagaagccctgttgcaggcagtagacccaggcctgccttctgtgaagcaagagccacctgacccagaggaggacaaggaggagaacaaggatgattctgcctccaaattggccccagaggaagaggcaggaggggctggcacacccgtgatcacggagattttcagcctgggtggaacccgcttccgagatacagcagtctggttgccaagtctgcagggcaggcactcgggaagggaagatggatgtaaagtgtgggagaccgaggacacagtggagcccacgagcacgagctggaacccacgaggatggcctggaacccatgtcagtctctcaccacctccagcttcgatgatgtgggtgtcctgcagaagaagctggtgcccttcctcacagagttaa

SEQ ID NO: 55 - DNA, 3803 bp, Homo sapiens
ggctcccgacacccgagccccgccgcgcctcccgctcccggctcccggctcccgctcctggctccctccgcctcccccgcccctcgccccgccgccgaagaggcccgctcccggtcggacgcctgggtctgccgggaagagcgatgagagagatgctgcccccacccccttaggcccgagggatcaggagctatgggaccagaggccctgtcatctttactgctgctgctcttggtggcaagtggagatgctgacatgaagggacattttgatcctgccaagtgccgctatgccctgggcatgcaggaccggaccatcccagacagtgacatctctgcttccagctcctggtcagattccactgccgcccgccacagcaggttggagagcagtgacggggatggggcctggtgccccgcagggtcggtgtttcccaaggaggaggagtacttgcaggtggatctacaacgactgcacctggtggctctggtgggcacccagggacggcatgccgggggcctgggcaaggagttctcccggagctaccggctgcgttactcccgggatggtcgccgctggatgggctggaaggaccgctggggtcaggaggtgatctcaggcaatgaggaccctgagggagtggtgctgaaggaccttgggccccccatggttgcccgactggttcgcttctacccccgggctgaccgggtcatgagcgtctgtctgcgggtagagctctatggctgcctctggagggatggactcctgtcttacaccgcccctgtggggcagacaatgtatttatctgaggccgtgtacctcaacgactccacctatgacggacataccgtgggcggactgcagtatgggggtctgggccagctggcagatggtgtggtggggctggatgactttaggaagagtcaggagctgcgggtctggccaggctatgactatgtgggatggagcaaccacagcttctccagtggctatgtggagatggagtttgagtttgaccggctgagggccttccaggctatgcaggtccactgtaacaacatgcacacgctgggagcccgtctgcctggcggggtggaatgtcgcttccggcgtggccctgccatggcctgggagggggagcccatgcgccacaacctagggggcaacctgggggaccccagagcccgggctgtctcagtgccccttggcggccgtgtggctcgctttctgcagtgccgcttcctctttgcggggccctggttactcttcagcgaaatctccttcatctctgatgtggtgaacaattcctctccggcactgggaggcaccttcccgccagccccctggtggccgcctggcccacctcccaccaacttcagcagcttggagctggagcccagaggccagcagcccgtggccaaggccgaggggagcccgaccgccatcctcatcggctgcctggtggccatcatcctgctcctgctgctcatcattgccctcatgctctggcggctgcactggcgcaggctcctcagcaaggctgaacggagggtgttggaagaggagctgacggttcacctctctgtccctggggacactatcctcatcaacaaccgcccaggtcctagagagccacccccgtaccaggagccccggcctcgtgggaatccgccccactccgctccctgtgtccccaatggctctgcgttgctgctctccaatccagcctaccgcctccttctggccacttacgcccgtccccctcgaggcccgggcccccccacacccgcctgggccaaacccaccaacacccaggcctacagtggggactatatggagcctgagaagccaggcgccccgcttctgcccccacctccccagaacagcgtcccccattatgccgaggctgacattgttaccctgcagggcgtcaccgggggcaacacctatgctgtgcctgcactgcccccaggggcagtcggggatgggccccccagagtggatttccctcgatctcgactccgcttcaaggagaagcttggcgagggccagtttggggaggtgcacctgtgtgaggtcgacagccctcaagatctggttagtcttgatttcccccttaatgtgcgtaagggacaccctttgctggtagctgtcaagatcttacggccagatgccaccaagaatgccaggaatgatttcctgaaagaggtgaagatcatgtcgaggctcaaggacccaaacatcattcggctgctgggcgtgtgtgtgcaggacgaccccctctgcatgattactgactacatggagaacggcgacctcaaccagttcctcagtgcccaccagctggaggacaaggcagccgagggggcccctggggacgggcaggctgcgcaggggcccaccatcagctacccaatgctgctgcatgtggcagcccagatcgcctccggcatgcgctatctggccacactcaactttgtacatcgggacctggccacgcggaactgcctagttggggaaaatttcaccatcaaaatcgcagactttggcatgagccggaacctctatgctggggactattaccgtgtgcagggccgggcagtgctgcccatccgctggatggcctgggagtgcatcctcatggggaagttcacgactgcgagtgacgtgtgggcctttggtgtgaccctgtgggaggtgctgatgctctgtagggcccagccctttgggcagctcaccgacgagcaggtcatcgagaacgcgggggagttcttccgggaccagggccggcaggtgtacctgtcccggccgcctgcctgcccgcagggcctatatgagctgatgcttcggtgctggagccgggagtctgagcagcgaccacccttttcccagctgcatcggttcctggcagaggatgcactcaacacggtgtgaatcacacatccagctgcccctccctcagggagcgatccaggggaagccagtgacactaaaacaagaggacacaatggcacctctgcccttcccctcccgacagcccatcacctctaatagaggcagtgagactgcaggtgggctgggcaagggagctgatgccccttctccccttcctggacacactctcatgtccccttcctgttcttccttcctagaagcccctgtcgcccacccagctggtcctgtggatgggatcctctccaccctcctctagccatcccttggggaagggtggggaaaaatataggatagacactggacatggccaattggagaacctgggccccactggacaacactgattcctggagaggagaccccagcttctctctccctgtcacacactggaccccactggctgagaatctgggggtgaggaggacaagaaggagaggaaaatgtttccttgtgcctgctcctgtacttgtcctcagcttgggcttcttcctcctccatcacctgaaacactggacctgggggtagccccgccccagccctcagtcacccccacttcccacttgcagtcttgtagctagactctctaagcctatacgtttctgtggagtaaatattgggattggggggaaatagggtgcaacgcccatagccttggggttggacatctctagtgtagctgccacattgatttttctataatcacttggggtttgtacatttttggggggagagacacagattttacactaatatatggacctagcttgaggcaattttaatccctgcactaggcaggtaataataaatgttgagttttccaaaaaaaaaaaaaaaaaaaaaaaaaaaaa

SEQ ID NO: 56 - DNA, 1668 bp, Homo sapiens
gagaagccgggagcgagcccaggcggcagtcttgattcccttttggccagcagtgtttaggtctgtcagtactgcactgcaagaatggcagattttgggatctctgctggccagtttgtggcagtggtctgggataagtcatccccagtggaggctctgaaaggtctggtggataagcttcaagcgttaaccggcaatgagggccgcgtgtctgtggaaaacatcaagcagctgttgcaatctgcccacaaagaatccagctttgacattattttgtcaggtttagtcccaggaagcaccactctgcacagtgctgagattttggctgaaatcgcccggatccttcggcctggtggatgtctttttctgaaggagccagtagagacagctgtagataacaatagcaaagtgaagacagcatctaagctgtgttcagccctgactctttctggtcttgtggaagtgaaagagctgcagcgggagcccctaacccctgaggaagtacagtctgttcgagaacaccttggtcatgaaagtgacaacctgctgtttgttcagatcacaggcaaaaaaccaaactttgaagtgggttcttctaggcagcttaagctttccatcaccaagaagtcttctccttcagtgaaacctgctgtggaccctgctgctgccaagctgtggaccctctcagccaacgatatggaggacgacagcatggatctcattgactcagatgagctgctggatccagaagatttgaagaagccagatccagcttccctgcgggctgcttcttgtggggaagggaaaaagaggaaggcctgtaagaactgcacctgtggccttgccgaagaactggaaaaagagaagtcaagggaacagatgagctcccaacccaagtcagcttgtggaaactgctacctgggcgatgccttccgctgtgccagctgcccctaccttgggatgccagccttcaaacctggggaaaaggtgcttctgagtgatagcaatcttcatgatgcctaggaggttcctgacatgggacccatctgctcctccagccaactcctgtccctcacatcccaccatggtggctcctcccacctcctctggatttgttcactctgagatctgtttgcagagtgggtgcttagcagacagagtgaagctggctggggggcacagtggtgtgtagtgctgctgtgtatcaaaagaccaaggtattatgggacctggtttcagaatgggatgggtttcttcacctcatgttaagagaagggagtgtgtcctgaagaagcccttcttctgatgttaaaatgctgaccagaacgctcttgagcccaggcatcgttgagcattaacactctgtgacagagctgcagacccctgccttgagtctcatctcagcaatgctgccaccctcttgtctttcagagttgttagtttactccattctttgtgacacgagtcaagtggctcacaacctcctcagggcaccagaggactcactcactggttgctgtgatgatatccagtgtccctctgcccccttccatccccaaccacatttgactgtagcattgcatctgtgtcctgttgtcatttatgttaaccttcaggtattaaacttgctgcatatcttgaaaaaaaaaaaaaaaaaaaaaaaaaaaa

SEQ ID NO: 57 - DNA, 1044 bp, Homo sapiens
cacgagggcgtccctctgcctgcccactcagtggcaacacccgggagctgttttgtcctttgtggagcctcagcagttccctctttcagaactcactgccaagagccctgaacaggagccaccatgcagtgcttcagcttcattaagaccatgatgatcctcttcaatttgctcatctttctgtgtggtgcagccctgttggcagtgggcatctgggtgtcaatcgatggggcatcctttctgaagatcttcgggccactgtcgtccagtgccatgcagtttgtcaacgtgggctacttcctcatcgcagccggcgttgtggtctttgctcttggtttcctgggctgctatggtgctaagactgagagcaagtgtgccctcgtgacgttcttcttcatcctcctcctcatcttcattgctgaggttgcagctgctgtggtcgccttggtgtacaccacaatggctgagcacttcctgacgttgctggtagtgcctgccatcaagaaagattatggttcccaggaagacttcactcaagtgtggaacaccaccatgaaagggctcaagtgctgtggcttcaccaactatacggattttgaggactcaccctacttcaaagagaacagtgcctttcccccattctgttgcaatgacaacgtcaccaacacagccaatgaaacctgcaccaagcaaaaggctcacgaccaaaaagtagagggttgcttcaatcagcttttgtatgacatccgaactaatgcagtcaccgtgggtggtgtggcagctggaattgggggcctcgagctggctgccatgattgtttccatgtatctgtactgcaatctacaataagtccacttctgcctctgccactactgctgccacatgggaaactgtgaagaggcaccctgggcaagcagcagtgattgggggaggggacaggatctaacaatgtcacttgggccagaatggacctggcctttctgctcccagacttgggggctagattagggaccactccttttaggcgatgcctgactttgcctt

SEQ ID NO: 58 - DNA, 1764 bp, Homo sapiens
gggaaactgtgtaaagggtggggaaacttgaaagttggatgctgcagacccggcatgggtagcaagaaactaaaacgagtgggtttatcacaagagctgtgtgaccgtctgagtagacatcagatccttacctgtcaggactttttatgtctttccccactggagcttatgaaggtgactggtctgagttatcgaggtgtccatgaacttctatgtatggtcagcagggcctgtgccccaaagatgcaaacggcttatgggataaaagcacaaaggtctgctgatttctcaccagcattcttatctactaccctttctgctttggacgaagccctgcatggtggtgtggcttgtggatccctcacagagattacaggtccaccaggttgtggaaaaactcagttttgtataatgatgagcattttggctacattacccaccaacatgggaggattagaaggagctgtggtgtacattgacacagagtctgcatttagtgctgaaagactggttgaaatagcagaatcccgttttcccagatattttaacactgaagaaaagttacttttgacaagtagtaaagttcatctttatcgggaactcacctgtgatgaagttctacaaaggattgaatctttggaagaagaaattatctcaaaaggaattaaacttgtgattcttgactctgttgcttctgtggtcagaaaggagtttgatgcacaacttcaaggcaatctcaaagaaagaaacaagttcttggcaagagaggcatcctccttgaagtatttggctgaggagttttcaatcccagttatcttgacgaatcagattacaacccatctgagtggagccctggcttctcaggcagacctggtgtctccagctgatgatttgtccctgtctgaaggcacttctggatccagctgtgtgatagccgcactaggaaatacctggagtcacagtgtgaatacccggctgatcctccagtaccttgattcagagagaagacagattcttattgccaagtcccctctggctcccttcacctcatttgtctacaccatcaaggaggaaggcctggttcttcaagcctatggaaattcctagagacagataaatgtgcaaacctgttcatcttgccaagaaaaatccgcttttttgccacagaaacaaaatattgggaaagagtcttgtggtgaaacacccatcgttctttgctaaaacatttggttgctactgtgtagactcagcttaagtcatggaattctagaggatgtatctcacaagtaggatcaagaacaagcccaacagtaatctgcatcataagctgatttgataccatggcactgacaatgggcactgatttgataccatggcactgacatgggcacacagggaacaggaaatgggaatgagagcaagggttgggttgtgttcgtggaacacataggttttttttttttaactttctctttctaaaatatttcattttgatggaggtgaaatttatataagatgaaattaaccattttaaagtaaacaattccgtggcaactagatatcatgatgtgcaaccagcatctctgtctagttccaaatattttcatcaccccaaaagcaagacccataaccattatgcaagtgttcctatttccccctcctcccagctcctggaaacccaccaatctactttgttgctatggctttacctattctggatatttcatataaatggaatcatatagtgtcataaaaaaaaaaaaa

SEQ ID NO: 59 - DNA, 3738 bp, Homo sapiens
cccgggtcggaccgcctgggtctgccgggaagagcgatgagaggtgtcgtaaggtggctattcactgagcgatggggttggacttgaaggaatgccaagagatgctgcccccacccccttaggcccgagggatcaggagctatgggaccagaggccctgtcatctttactgctgctgctcttggtggcaagtggagatgctgacatgaagggacattttgatcctgccaagtgtcgctatgccctgggcatgcaggaccggaccatcccagacagtgacatctctgcttccagctcctggtcagattccactgccgcccgccacagcaggttggagagcagtgacggggatggggcctggtgccccgcagggtcggtgtttcccaaggaggaggagtacttgcaggtggatctacaacgagtgcacctggtggctctggtgggcacccagggacggcatgccgggggcctgggcaaggagttctcccggagctaccggctgcgttactcccgggatggtcgccgctggatgggctggaaggaccgctggggtcaggaggtgatctcaggcaatgaggaccctgagggagtggtgctgaaggaccttgggccccccatggttgcccgactggttcgcttctacccccgggctgaccgggtcatgagtgtctgtctgcgggtagagctctatggctgcctctggagggatggactcctgtcttacaccgcccctgtggggcagacaatgtatttatctgaggccgtgtacctcaacgactccacctatgacggacataccgtgggcggactgcagtatgggggtctgggccagctggcagatggtgtggtggggctggatgactttaggaagagtcaggagctgcgggtctggccaggctatgactatgtgggatggagcaaccacagcttctccagtggctatgtggagatggagtttgagtttgaccggctgagggccttccaggctatgcaggtccactgtaacaacatgcacacgctgggagcccgtctgcctggcggggtggaatgtcgcttccggcgtggccctgccatggcctgggagggggagcccatgcgccacaacctagggggcaacctgggggaccccagagcccgggctgtctcagtgccccttggcggccgtgtggctcgctttctgcagtgccgcttcctctttgcggggccctggttactcttcagcgaaatctccttcatctctgatgtggtgaacaattcctctccggcactgggaggcaccttcccgccagccccctggtggccgcctggcccacctcccaccaacttcagcagcttggagctggagcccagaggccagcagcccgtggccaaggccgaggggagcccgaccgccatcctcatcggctgcctggtggccatcatcctgctcctgctgctcatcattgccctcatgctctggcggctgcactggcgcaggctcctcagcaaggctgaacggagggtgttggaagaggagctgacggttcacctctctgtccctggggacactatcctcatcaacaaccgcccaggtcctagagagccacccccgtaccaggagccccggcctcgtgggaatccgccccactccgctccctgtgtccccaatggctctgcgttgctgctctccaatccagcctaccgcctccttctggccacttacgcccgtccccctcgaggcccgggcccccccacacccgcctgggccaaacccaccaacacccaggcctacagtggggactatatggagcctgagaagccaggcgccccgcttctgcccccacctccccagaacagcgtcccccattatgccgaggctgacattgttaccctgcagggcgtcaccgggggcaacacctatgctgtgcctgcactgcccccaggggcagtcggggatgggccccccagagtggatttccctcgatctcgactccgcttcaaggagaagcttggcgagggccagtttggggaggtgcacctgtgtgaggtcgacagccctcaagatctggttagtcttgatttcccccttaatgtgcgtaagggacaccctttgctggtagctgtcaagatcttacggccagatgccaccaagaatgccaggaatgatttcctgaaagaggtgaagatcatgtcgaggctcaaggacccaaacatcattcggctgctgggcgtgtgtgtgcaggacgaccccctctgcatgattactgactacatggagaacggcgacctcaaccagttcctcagtgcccaccagctggaggacaaggcagccgagggggcccctggggacgggcaggctgcgcaggggcccaccatcagctacccaatgctgctgcatgtggcagcccagatcgcctccggcatgcgctatctggccacactcaactttgtacatcgggacctggccacgcggaactgcctagttggggaaaatttcaccatcaaaatcgcagactttggcatgagccggaacctctatgctggggactattaccgtgtgcagggccgggcagtgctgcccatccgctggatggcctgggagtgcatcctcatggggaagttcacgactgcgagtgacgtgtgggcctttggtgtgaccgtgtgggaggtgctgatgctctgtagggcccagccctttgggcagctcaccgacgagcaggtcatcgagaacgcgggggagttcttccgggaccagggccggcaggtgtacctgtcccggccgcctgcctgcccgcagggcctatatgagctgatgcttcggtgctggagccgggagtctgagcagcgaccacccttttcccagctgcatcggttcctggcagaggatgcactcaacacggtgtgaatcacacatccagctgcccctccctcagggagcgatccaggggaagccagtgacactaaaacaagaggacacaatggcacctctgccccttcccctcccgacagcccatcacctctaatagaggcagtgagactgcaggctgggcccacccagggagctgatgccccttctccccttcctggacacactctcatgtccccttcctgttcttccttcctagaagcccctgtcgcccacccagctggtcctgtggatgggatcctctccacccacctctagccatcccttggggaagggtggggagaaatataggatagacactggacatggcccattggagcacctgggccccactggacaacactgattcctggacaggtggctgcgcccccagcttctctctccctgtcacacactggaccccactggctgagaatctgggggtgaggaggacaagaaggagaggaaaatgtttccttgtgcctgctcctgtacttgtcctcagcttgggcttcttcctcctccatcacctgaaacactggacctgggggtagccccgccccagccctcagtcaccccccacttcccacctgcagtcttgtagctagaacttctctaagcctatacgtttctgtggagtaaatattgggattggggggaaagagggagcaacggcccatagccttggggttggacatctctagtgtagctgccacattgatttttctataatcacttgggtttgtacatttttggggggagagacacagatttttacactaatatatggacctagcttgaggcaattttaatcccctgcactaggcaggtaataataaaggttgagttttccac

SEQ ID NO: 60 - DNA, 1302 bp, Homo sapiens
ggaagctatgagggaccctgtgagtagccagtacagttcctttcttttctggaggatgcccatcccagaactggatctgtcggagctggaaggcctgggtctgtcagatacagccacctacaaggtcaaagacagcagcgttggcaaaatgatcgggcaagcaactgcagcagaccaggagaaaaaccctgaaggtgatggcctccttgagtacagcaccttcaacttctggagagctcccattgccagcatccactccttcgaactggacttgctctaaggccaagacttctctctcccatcaccttgccctcattgtcttccctctcaagccccttcctttccactcctttcccattttaatcttgttctctccctactgtgttggtggtgctgatgaatctgccagagttgagttctatgtatttatttatctatctgtctactccatttctctcaaaagccctcaagtcacaaagtaaatggttcaagcaatggagtactgggtcacagggattcctcctttcccccccaaatattaactccagaaactaggcctgactggggacacctgagagtagtatagtagtgcaaaatggaagactgatttttgactctattataatcagcttcagagattccttaaaccttcctaatttcctgctccagggcagtaaacacaaatatttcttcaaggggtgatgaaaacctcggaagttttaatttgaggttatctgctacgaaacagtatttctaaaaggctaaagtgataagtctcttgcttttttttgatcctgctcttatattcttttttttcctcagagaaatcaggagggtagttagaggtataaaacaggaggaaatattatggaaaatgaaaatagggaaaataattgaatcattttagaagtagctaatttcttttctcaaaagagtgtcccttcttcacacctactcactttacaactttgctcctaactgtgggttgaaaactctagctaaagaaagttatcaaatcttaacatgcattcctactattatgatagtttttaaggtttcaattcaatcttctgaacggcataagtcctattttagccttacctcctgcatttgcaatacgtaatactgatcagtgggcacagttcttcagctacattgagaccctgaaatgaacaattatattctgactcgacatcttgtccccaatccttccaaaaatattgatggtgatttgtgctaccatttactcgtttatttaataaagacattcaatcccaggaaaaaaaaaaaaaaaaaaaaaaa

SEQ ID NO: 61 - DNA, 1471 bp, Homo sapiens
aaactttttccccggcgtggtctcactcgcgatttaaggcataggtgtcgccgagccgggaggctgggagtcgccaggcgtgcgggggagaggcctgggccgcgccgcggcggggggtggaggaagagggcaggcgaggcgggaaggtgggctctggccgccgggagccggggacggagccgccgccgttgcccctagcggggagcagccgggaggagggggccgcagtcgggagaggggaccccaccatgcccaaagtcttcctggtgaagaggaggagcctgggggtctcggtccgcagctgggatgagctcccggatgagaaaagggcagacacctacatcccagtgggcctaggccgcctgctccacgacccccccgaggactgccgcagcgacggcggcagcagcagcggcagcggcagcagcagcgcgggggagcctggaggagcagagagcagctcgtccccgcacgcccccgagagcgaaacccccgagcccggcgacgccgagggccccgatggacacctggcgaccaagcagcgcccggtcgccagatcgaaaatcaagttcaccacaggcacgtgcagcgactcggtggttcacagctgtgacctgtgtggcaagggcttccgtctgcagcgcatgctgaaccgtcacctcaagtgccacaaccaggtgaaaagacacctgtgcaccttctgcggcaagggcttcaacgacaccttcgacctgaagaggcacgtccgcacacacacaggcattcgtccctacaaatgcaacgtctgcaataaagccttcacccagcgctgctctctggagtcccacctgaagaaaatccatggggtgcagcagcagtatgcctataagcagcggcgggacaagctctacgtctgcgaggattgcggctacacgggccccacccaggaggacctgtacctgcacgtgaacagtgcccatccgggcagctcgtttctcaaaaagacatctaaaaaactggcagcccttctgcagggcaagctgacatccgcacaccaggagaataccagcctgagtgaggaggaggagaggaagtgaggagaaggaaggggaggacagacgttcacactgccacgtatgtctacgtggatttttggttttcagcttcccccaccccactggctcttcttaattagaagtgaccagttcacctctgtgtccttttgaaacatcagcagtagggtccattccaagattgtcagttaccgttagtgacgtcaggccctgtaacctgtgtcctgtctggcgcagttgctcacattcaccaaagtttgttttcatgatcctgatggccaagaacaccgtgtgggattttttttcccccaaggattttcacacacggaaggagaggtatttcttagagagatcatcattttatggtgccttgaaataaaaatacttctacttgaaatgctaaaaaaaaaaaaaaaaaa

SEQ ID NO: 62 - DNA, 1062 bp, Homo sapiens
atgggtatctttcccggaataatcctaatttttctaagggtgaagtttgcaacggcggccgtgattcaccagaaaagtaccactgtaagtcatgagatgtctggtctgaattggaaaccctttgtatatggcggccttgcctctatcgtggctgagtttgggactttccctgtggaccttaccaaaacacgacttcaggttcaaggccaaagcattgatgcccgtttcaaagagataaaatatagagggatgttccatgcgctgtttcgcatctgtaaagaggaaggtgtattggctctctattcaggaattgctcctgcgttgctaagacaagcatcatatggcaccattaaaattgggatttaccaaagcttgaagcgcttattcgtagaacgtttagaagatgaaactcttttaattaatatgatctgtggggtagtgtcaggagtgatatcttccactatagccaatcccaccgatgttctaaagattcgaatgcaggctcaaggaagcttgttccaagggagcatgattggaagctttatcgatatataccaacaagaaggcaccaggggtctgtggaggtgcttatgttcaaaagctgttaccggctgtgtgctgtggctcatgcctgtaatcccagcactttgggaggccaacgcgggtggatcacttgagggtgtggttccaactgctcagcgtgctgccatcgttgtaggagtagagctaccagtctatgatattactaagaagcatttaatattgtcaggaatgatgggcgatacaattttaactcacttcgtttccagctttacatgtggtttggctggggctctggcctccaacccggttgatgtggttcgaactcgcatgatgaaccagagggcaatcgtgggacatgtggatctctataagggcactgttgatggtattttaaagatgtggaaacatgagggcttttttgcactctataaaggattttggccaaactggcttcggcttggaccctggaacatcattttttttattacatacgagcagctaaagaggcttcaaatctaa

SEQ ID NO: 63 - DNA, 979 bp, Homo sapiens
aaaatataagccagggtattactggccacctgactctacagcgtcccacatgcgaacacaggctagacaagggaggagtttctcaaacggttttaatcggttctctccgcgtcacaagccatcgggtaaggcaacggaatgtgcgtggggtcccctgtggctccgcggtcacaatactgagcctggaattgctgttagcaaaatatacatttgtgtcaccataaaaaaccgcgccgccggccctcgggtctcacaacaggtataaaacaattataaatatttacacccttgttacacgcttttacggaaaggggatccgtaggagagcccccgggacaggacgcgggggcggtagaaagagcacagagaagacaggaggagcgcccgccttccgggtcccagcatcagaggcaggcaaaacacagaaatgagactttggtccaaaatttgaaggaagaaaaaaccctgaagtttgagagcaaggttgttctatggcgactgcacggtgaaggcgtaggtgtaaggcaaccggaggcgatgccagaggcggcgacaacggcccgccccttccctgaagctcaggggctctaagataggaccggggctccctgtgcctgacccactgggcggcccgacctgctctctggaaactgggtcctgcctgtgacttaattacgaagggaaaataccaatgagcgagtaagcaggcatagcagggataactacccacaagggagagtataagattacattcataccattgtatctgtctggctatgcaagagttcgttgagaagctagttctttttgcctattacttggaaccgcactgacacttttgctcaacggagacatgcggaaggccgaacgtagaatgcagttttaccagcgatgatgcaccgtccagtgcagaagggaacgctgggaaaggacgctggccggtgcagacaacaagtaaagcggttggttaacgccacag

SEQ ID NO: 64 - DNA, 715 bp, Homo sapiens
tctcgctggtgtgaccccctcaccccttggatcgccaggacaccccggggtggtggggtggctgcaggaagggaggttttttaaggcacaaggaagccaagtcgtggtcggggcgcccagctgcaggccccacgcccgacacaggccccaccaaggcatgggcccgagggtctggccccgggtgtggagggccgggaactcccgctgccacagtcaccaagagcctgagctgtccctgtcaccgcaggtgaggcaaggtgaactagatttaattttttttaaaaacaggtaaactgatttctctttaaaaaaataaaatctctggtctgctaaggtcacttcagctgtttttaaagatggctttctctggaatgatggaagttgtcgccaggggcccggcgtgtgggcctgtgactcagatggtggatctggagaaggagacccgagtgagtggttctccccaggttctggttgtgcaggtcaatgaaggcctggaccgcctccttcacgagcccatgtggatgagtggcaatcttgcagtcctttctggagaacttgaattctttgaagtacggcccaatatgtggaaaataagaacttgagattctttcttcgagacttaggggcgggattgttggagaagtggagtcttggcacagggcggaaatattttatcggaaattactcggagacccgacttcttggaagcggtgca

SEQ ID NO: 65 - DNA, 918 bp, Homo sapiens
ttctaatctttctctggggggaacaggccacagaactgtgttagaggtgaaccatcttaattactagttctattacctaattcagcttccttgtttggtctgctgtggatctgccttattgcatacgccatgcatcagataatggatgcatcagataatggtgttagacaaagcttcattgtgaacaacctaatgcattttagagaaacaatctcatcacattttttctagcctttcctacatttaaacttgctgttgcccaaattataattttttaaatgtctttggtgggcttctgttaattcacatgacttgagcttatagctatgtctactgcacagattgggtaatggaacactaaacttttatacttgaaaatgacagccttaaatgctcatatcagtcacaaatctaggatgtactgtcttgttgtatgtgagctttgtagagatttttaaaaatataagcatcaccttcccattgaagagtggagagagtctactggatgactggccaggaactttctctctgaatcggacatttggatgtcttctttcttccaagaaatggtggttcacattaaagtatcatggcttatgtatgctcaaatggaatcttatgttactttcttattaaatctggtctgcctattttagataacatgcacggcatgtcttcaccaatcacatatagctgagatgcacacatggataacgacatccacggtcatttcaaattccactgccttggggatctaagatatcggggggcaggcccaacattccgacctcactgtctaatcagtgagcaatgctccaaaacattgatgcccacggcacctccccgtgtcccaacgaacaaccccacaattccaacgcggccccccgattctccaccgctctgctcacttactaatag

SEQ ID NO: 66 - DNA, 1139 bp, Homo sapiens
ttttvttgtggactgagtttttttttttcctttacatcaaatatcctcaatggaagaggggatattgcacacaaatatcataaaagcactacatattactttcactggaaactaattttctacattagatatgactggataggatagaagtgatgcaggattataagacataataccatacacagctgcagactgaaacaaacaccattcagaacaagaaaaaggagtttaaagtgcttttcagckgggctcaagaccacttctttccagtcctggaaagaggggctgcatgcagtttaggaaaagcgtgtttttgaactgccacagggtgtcctcgaaagggcagcccggtcttgatgccactcctccatggctcctgttttggggagcyccaaacaagtccagaaaagctgcctattttttcccttccttttcagtttttgatgctgcctttaaaaatcaacttcatgaagtcacagattttttaacagtaaatagttttaataccaggtgaataacctaattgctttcaaagaaatgctcatccctaggctgcttttggtgtattgttcagttggttaaaagataaaagcttacagtccctttcaaatggaaacaggatcttttcttctaaatctgaagcacaaaaaaaaaaagttattatcctaactcacaatatcattactgagcaggaacctcctgtaamaggtgahtaaagaraggaaagaaaagcaaattcagaattgtagagcagcycctaagagctgaaatttggtaacagagggaaaatgaaaggkggtaagatttccattagcaaatgattaaatcttaattaaatgagttttggaaagctcctagactgcataagctattggagaaactwaaaacatttatatacactggggaaccatttactatkawatgtaacgttaagaaaaaaaatttttttgaactcatgggaaatggtgtttaaagagggggagggggggaagttagttattgtwtccagtcccccacaagacttaaaaagcatgccagggctcagggttttgagaaggggaaagattggttaaaattgaaatggaggatmacgctaaattwakytytttgattttgttwagatacacmaaaaggtatga

SEQ ID NO: 67 - DNA, 574 bp, Homo sapiens
ttttttaagatttaatgctttattgctcttgatggcaaatcaaaatatgctttagaaataaagttaatttactggaaaataggagtttttgcaccaaaccataaaattgcatttcattacatcaagagaaccccctcattgtctacaatcatgcccgcttcctttcccctcagcgcccgggacacgtgaccgagatcataccctaaattcctgatccttttgcagttgccacatactgtggcttttagtacatcataaaaaagtgctttcctgtggcctcagctgggaggccctggcgctggggctaaggggcccaaggcaccatccaaaggctgggaggaaagaacccaaacccaggccctcctcctgccctcaagcctttgacaggcaactcatttggcatgatctgttttggtgtgtttaaaacatacatttgcatgtgtctagtgtaaagcaacaagtttgaggaaataagtggaaggagagaggaagttccagttagatggttccactagtgtctactggtaattggcaaaactatgagtgttgctaacctgggctgagggcacctctg

SEQ ID NO: 68 - DNA, 524 bp, Homo sapiens
ctctgccagaaaaaacgtttaattccctcatgaccaaaacaaaaaagaactggcttcaacaactagctgggtctgtgctggcctccaagaccttgaatagcccaaatatggagaggttaggtaatgtggccatagtgggcgtgggatgagacatcatcagttcacgccaacacccgtggctttcctcagcagcccaggtttctccatttccccctctgggctctgaatttgtcctcctgtcccagactcatagcctcccctaaagggcagaaggtaccagtgaggctgaggctgaaggaacacccaaagactccaagatcggaggggagggcccactccctggagcctactgaccccctccagctggactgacagcctgccagggacaaagcaggaccctgaccacaggaccctcgggaatagcccctctactcttgctccccagggaactcccctggaagagggaccctcagcatttctgggagtccaggggcctgctgcccacaatccccaggtagcctcag

SEQ ID NO: 69 - DNA, 819 bp, Homo sapiens
tagttgatcagtccgtaatcaagaaaaaaaagtataaactttaataatgctgtgaacgtggtttccatatttattttctctgatgggtgactgcacatcagtcatcttgagtttatgctaactacttaggctggtcacgacacacacacacatacagagaagtcacacaggctgtaccgggctggctgttgcaaatgtacatgaattacacgggttgaagttgtttggcagctagttaacatatgccacccaatgacgggacacaatctggtcacacgctgcctctcctgcctgttgctgttctttacaaaggtccgtgtgtcgggctggcaaagtggcatcctgctggcatctctgtggtggccccggaatggtggagtgcccaggtcagcatctactctgggtcccattctcaactgctctggccttgacatcagagcttccggttccctgctggctcttctgcacactggatccatgccagtccaggccccctccaggcacacacctgaggcagactgagagcacaatggacgctgtcctgatgtgaactgtgcccagacacaggatggggggaagcgggagatgtgaccacaacaaccacacacaagctccgatctttacagatgggccctctgggactgctatatggggtggtgcccgagagacacgggggccatgtggagcccaccaggcacagttgctgggaagaggacagacaggaggggacctgtgcccagtgcctgacctgaaagcaaagccaaaaagggtgaaggggaacgtgttcgaacaggtgcctaatgttgaaaagtcagacta

SEQ ID NO: 70 - DNA, 572 bp, Homo sapiens
  misc_feature (1)..(572): n = a,c,t, or g
caggcttgttgatgcattttattgtgagatgggagtctggtaaaaaactagaaaatgaccatgatgtaacaaggaacttaaaaatgaagagtcagatctgtaacttacatacatgaatacaggaacaaattggcacaaaatgttaaacattgttcccaacactgtttatagaagttaatcctaatttggcttactaaggaaatgagagttgtatggttaggctgatttctttaataaaactgcagagcatcatgctattagtcacacagtgaatttcaaaatttaagttttatattaaaaactgggtaaaggtaaaatgacttgattgtagttgtaaaactaatacattcccatttaagttctgttctacagtccaaggcaagtataaatgttaacataacactgttaaatcaaatctcaatgcaggagaaccaattgcatctctactttaaatcttatcaactttccaaattttcatactaaaatatattattgtattaatacaaactacagtattatacactacactgtgtaataaataaagaaatatanaaataagacacataaatata

SEQ ID NO: 71 - DNA, 642 bp, Homo sapiens
  misc_feature (1)..(642): n = a,c,t, or g
gggtttttttgaagcttttataaatgaggttaaacaaatgccaaattacggtgtgttagtacaagtctgtagcatctgtgtacagcaacatccatccaaaggcagaatcacagcctcgtatcggcctcgagtcttgagtcacattcatatcttaaaatacacgagtattccttttccgtctagtctcagttataggcagctacttcccagactctactttcacttctctctactttttcagacctggttcccatggcactagtgtagaaggttttagggtataagaagagggggcaataaggctaccctatcactatgacaaccaagaaggaggctggagcgtgaatccccaacgctgagggtggggagccatccctctctaccaaggtggcaatgatggagggaacttgcatggctaagcatccaggatgccatgcagcagacaccagggagcactgagccactgctggagcatttcctgcctctgccaggcggcctgcggaaagtgtttcacataactaaaaaaagtcaacacagtctcatgtatgcattaaaaaaaagctgtcnagtataaaaanccagacactggaagctgaaagacaagtgagtgtgagagccntctccaggcacacagtngagtgc

SEQ ID NO: 72 - DNA, 543 bp, Homo sapiens
  misc_feature (1)..(543): n = a,c,t, or g
catatgtacannnttcnntattaaaagtatggcactttatataacagcagaaataattacatgatttcacatccagaagcaataaaatgtggaggtgcaaacattccttattcccaataaaagtaaaaaagtttcaacatgttctgtaagcccttaattgcataaagtatatttagcatcatttacagccagtacacttatataaactaattatcattaccttttacattctgcaaaagaaatatgttaaagtaaagaagcatggcgagacaaacatgaattaaatgtcagttctgatcattcatggggaaatataagccgataattataaactactagataacacaatgattttaacaatttttgatgtttttaaagttaaaaaaactccactacatgccatattgaaagaaaaggttgttttttttttaactgcagcacctttagacaacaaaagattgcatcctgttcaaccacactatataaattataacatttgtggaaaatatgtacacacaaacataaagcaagtgttctaacagt

SEQ ID NO: 73 - DNA, 607 bp, Homo sapiens
  misc_feature (1)..(607): n = a,c,t, or g
ccaaacaagattatactcactcaaggcaagtgcaagatcttgaagtactagcagttaagtaatattgaattgtattgaatagttcacatagtntattctagtctttgaaaattactgaacatggacaatgtgcatgtcattgacatctgccttagaacttctgggacaatcctgattcgagagattctatcccattatttacatataccaaaaatactttgttaatttaatgtgttggcttcccaactcctgaacacgacacaattttattattagattttgtatggtgattttaggctatgaaaacatgatcattatatgtatatagatacatttttatttgttacaaatgtttgagcagctcactagcccacccctcctctattttgggtaagagaatttactaccttttttaactatgtagttgagagcaacatgtattttgttatttttagaatggtcagtatattgctataaaattttaaatgagcctatgaaagttaaagtattctgattctggttaaattaacgaatatggttccaggccctgttctctgggtttttgagagagaataaaggttatgtttgtcttaaaaaaaaaaaaaaa

SEQ ID NO: 74 - DNA, 1198 bp, Homo sapiens
ccggcaaagcccagctacaggcgggcgactgcggggggcccctgaggcggcgggggccatggctggggtcgcgtgcttgggaaaagctgccgacgcagatgaatggtgcgacagcggcctgggctccctgggtccggacgcagcggcccccggaggacctgggttgggcgcggagttgggcccggggctgtcgtgggctcccctcgtcttcggctacgtcactgaggatggggacacggcactgcacttggctgtgattcatcagcatgaacccttcctggattttcttctaggcttctcggccggcactgagtacatggacctgcagaatgacctaggccagacagccctgcacctggcagccatcctgggggagacatccacggtggagaagctgtacgcagcaggcgccgggctgtgtgtggcggagcgtaggggccacacggcgctgcacctggcctgccgtgtgggggcacacgcctgtgcccgtgccctgcttcagccccgcccccggcgccccagggaagcccccgacacctacctcgctcagggccctgaccgtactcccgacaccaaccatacccctgtcgccttgtaccccgattccgacttggagaaggaagaagaggagagtgaggaggactggaagctgcagctggaggctgaaaactacgagggccacaccccactccacgtggccgttatccacaaagatgtggagatggtccggctgctccgagatgctggagctgaccttgacaaaccggagcccacgtgcggccggagcccccttcatttggcagtggaggcccaggcagccgatgtgctggagcttctcctgagggcaggcgcgaaccctgctgcccgcatgtacggtggccgcaccccactcggcagtgccatgctccggcccaaccccatcctcgcccgcctcctccgtgcacacggagcccctgagcccgagggcgaggacgagaaatccggcccctgcagcagcagtagcgacagcgacagcggagacgagggcgatgaatacgacgacattgtggttcacagcagccgcagccaaacccggctgcctcccaccccagcctcaaaacctcttcctgacgacccccgccccgtgtgatttgtttcattgttaatataatttccagtttaataaacaaaaccctagttctgacaaccagaaaaaaaa

SEQ ID NO: 75 - DNA, 976 bp, Homo sapiens
  misc_feature (1)..(976): n = a,c,t, or g
cttcaatttgaaatcaccttttctaaaaagtcaattcatctagttaagtcgctgaacaattacctgccaaatgctatactgtgtcatggtgatgcaagtcactaaatttctcagtttttgctgattgctaagggaaataacagtatttccacaatagggttcaaattcctgcaaaattacctaccccagttcatctctgctgaacatttggaaaccatgcactagccaacccaactgacttctgctaggtagaggcatttgtcttagagagagagagagcgcgggagagagtgagagagagtgagagcacaaagataacgcaggagagagagagagaaagaatgagaaagaaaaggaatgcaagagaaggagatgtaatgacagagagttctggtgagatacccagagagaaaaagagagagcagggtggggtaaggaggagaaaataaaccaacaattaggtctgcattttctcaggcagtaggcattctttagtctacataggcaaagttttccattttgtcagtctgagtcatcaaaaagagtcttaattttctaaaacaagttggctagaagaaagtaaaaagaacaacacttgttatgaggggcctgtgatattttcacatcttagttaagctccttaagtttgaaggctgcacactgacataatgtagtgagtgtagactggccatgcaagtggttgggccccatttcagaaaatctcagactctaaaccaccagtgattgccctagcatgctccagaattgtcccgcacttagtcactctggttcgattactgttgcgaaaccagtcccccattatgacaatacccagcggggtctttggtaacatggccgagatgaatcaaaacgggcccttcgggcacgttaaacctgctactaaacaggatgggtaaaacactccaggcaaacaccagcgaaagattatatacaacggatgccttgaaaaaatanc

SEQ ID NO: 76 - DNA, 5726 bp, Homo sapiens
ctatgaggaagctatcaaatactatgaacaatatttatctgtcgtgcagagtctgaatcgcatgcaagaccaagccaaggcttaccggggcctgggaaatggacacagggcaatggggagcttgcagcaagcccttgtgtgctttgaaaagaggctcgtggttgctcatgaacttggagaggccttcaataaagcccaggcctatggagagctgggaagtctgcacagccaattagggaattacgaacaagccatttcctgccttgaacgccagctgaacattgctagagatatgaaagaccgagccctggagagtgacgcagcctgtggcctggggggcgtttaccagcagatgggggagtatgacacagccctgcagtaccaccagcttgatctacagatagcagaggaaaccaacaaccccacgtgccagggccgagcctatgggaacctgggcctgacttatgaatccctgggcaccttcgagagggctgtggtctatcaagaacagcacttgagcattgctgcacagatgaatgacttggcggccaagacggtgtcatatagtagccttggaaggacccatcatgccttgcagaactattcccaagcagtcatgtacttacaggaaggtttaaggttagctgagcaactgggccgaagagaagatgaggcaaaaattcgccatggccttggcctctccctttgggctagtggaaacttggaggaggcccaacaccagctttatagggcatcagccttgtttgaaacaatccgacatgaggcacagctgagcacggactacaaactctccctctttgacctgcagacatcatcctaccaggccttgcagcgggtgctcgtcagcctaggccatcatgatgaagccctggctgtggcagaaaggggacggacaagggcatttgctgatcttctggtggaacgacaaacaggacaacaagactccgacccctactccccagtcactattgatcagatcttagagatggtaaatggccagaggggactagtgctttactattccctggctgcaggctatctgtatagctggctgctggctcctggggcaggaattgtgaagtttcatgaacactacctgggtgagaacacagtggaaaactcaagtgacttccaggccagcagcagtgtaacccttccaacagcaaccggctcagccctggagcagcacattgccagtgtccgggaggccctgggggtggagtctcactactcaagggcctgtgccagcagtgagacagagagtgaagcgggagacatcatggaccagcaatttgaagagatgaacaacaaactcaactcggtcactgaccccactggctttctgcggatggttcgccgcaataacctgtttaacaggagctgccagagcatgacgagcctgttcagtaacactgtgtcaccgacccaggacgggacctcctctcttcccaggaggcagagctcgtttgccaagcccccgctccgtgccctgtatgacctgctcatcgcgcccatggaagggggcctgatgcactccagcggccccgtgggccggcaccggcagctcatcctggttctggagggggagctctacctcattcctttcgccctcctgaagggaagctcctccaatgagtacctctacgagcgcttcggcctccttgctgtcccttccatccgctccctcagcgtgcagtccaagtctcacttacggaagaacccgcccacatactccagctccacatccatggcggctgtcatcggcaaccccaagctaccatcggccgtgatggacaggtggctgtgggggcccatgccatcggccgaggaagaggcctacatggtgtccgagctgctgggctgccagcccctagtgggcagtgtggccaccaaggagagggtcatgagtgccctgacccaggctgaatgcgtccactttgccacccacatctcctggaagctgtcggccttggtcctcacgcccagcatggacggcaaccctgccagcagcaagagctccttcggccacccctacacgatccctgagtccttgcgggtgcaggacgatgccagtgatggggagagcatctcggactgcccgcccctgcaggagctgctgcttactgccgccgacgtcctggacctgcagctgcctgtgaagctggtggtgcttggctcctcccaggagtccaacagcaaagtcacagccgacggggtcatcgcgctgacaagggccttcctggctgccggcgctcagtgtgtcctcgtgtctctgtggcctgtgccagtggctgcttctaagatgttcatccatgccttctactcatccctgctgaacggcctgaaagccagcgccgccctgggggaggccatgaaggtggtgcagagcagcaaggccttctcgcacccctccaactgggcagggttcatgctcatcgggagtgacgttaagctgaacagcccctcatcactcatcggccaggccctcacagagatcctgcagcacccggagcgtgcgcgggacgccctgcgagtgctgctgcacctggtggagaaatccctgcagcgcatccagaatgggcagcgcaatgccatgtacacatcccagcagagtgtggagaacaaagtgggcggcatccctggctggcaggccctcctcaccgctgtgggcttccggctggaccccccaaccagtggcctgccagcggctgtcttcttcccaacctccgacccgggcgaccggctccagcagtgcagcagcacactccagtccctgctgggtctgcccaatcctgccctccaagccctttgcaaactcatcactgcctccgagacgggcgagcagctcatcagccgggctgttaaaaatatggttggaatgctccaccaggtgctggttcagctccaggctggcgagaaggagcaggacttggcatcagctcccattcaggtctccatcagcgtccagctgtggcggctcccgggatgccacgagttcctggcagctctaggttttgatctctgtgaagttggtcaggaggaagtaatcctgaaaaccgggaagcaagctaatcgacggactgtgcacttcgcgctccagtccctgctgtctctgtttgattctactgagctacccaagcgcctcagccttgacagctcctcctccctcgagtctcttgcttctgctcagtctgtttccaacgccctgcccttgggttaccagcaaccccccttctctcccaccggtgcggacagcatcgcctcagatgccatctctgtgtacagtctgagctccattgcctcctcaatgagctttgtctccaaacccgagggtggatcagagggtggaggccccggaggacggcaggaccatgaccggtccaagaacgcttacctgcagagatccaccctgcctaggagccagctgcctccccagacccgccctgcaggcaacaaagatgaagaagaatatgaagggttttctatcatcagtaacgagcccttggcgacctaccaagaaaaccgaaacacatgcttctcaccagaccacaaacaaccccaacctgggacagccggaggcatgagagtctcggtgagctccaaagggagcatcagcactccaaattctccagtgaaaatgactctgattcccagccccaactcacccttccaaaaggtgggaaaactagcaagctcagatacaggagaatcagaccagtctagcacagaaacggacagtaccgtgaaatcccaagaagaaagcaacccaaaactggatccacaagagttagcccagaaaattctggaggagacacagagtcatctcattgcggtggagcgtcttcagaggagcggcggccaggtgagcaagagtaataaccctgaagacggcgttcaggcgcccagcagcactgctgtcttcagagcgtcagaaaccagtgcgttcagcaggcctgttctctcccatcagaagagtcagccatcaccagtcactgttaaaccaaagcccccagccaggagctcctccctgcccaaggtgagttccggatatagcagccccaccacctcagagatgtccatcaaagacagcccgagccagcacagtggccggccatcgcccggctgcgactcacagacttcccagctggaccagcctctctttaaactgaagtaccccagctctccttacagcgctcacatttccaaatcaccaaggaacatgtccccaagctccggccaccagtctcctgctggcagtgcaccctccccagctctctcctactcctcagctggatctgctcgctcaagtccagcagacgctcccgacatagacaaactgaaaatggcagccattgatgaaaaggtgcaggctgtccataacctgaagatgttctggcagagcacaccccagcattccacagggccaatgaagatcttccggggggctcctggcacgatgacttccaaaagggatgtcctcagtctgctgaatttgtcaccacggcacaataagaaggaggagggagtggataagcttgaactgaaggagctgtccctgcagcagcatgacggagctccaccgaaagcccctcccaacggacactggcgcaccgagaccacctcgctgggctcactgccgctgcccgccggccctcccgccacagcccccgcgcgccctttgaggcttccttctggaaatggctacaagttcctgtctccaggaagatttttcccttcttccaaatgctaaagcatcttttatacccactgactctgagcagcctgcagatgggggcctggcgtttgcttcagcccttccctgagtgcagtccccccacagccaccagcaccctcatgatgctgtgctctgcaggcgaggggcaccaccacgtccaaaggctgccacacacactggtggcttttctgggccacattcaccaaaagccaggacttctgtggggctggtacaggaggctcatggaatttcctacacacttcaccaaatgtttgtttacctttgaactccctgcttctcatctttgatatgattcttcaccaggattttgtacaaaaatgatcatggttctggggtggggagaggaaagggagcacatattttgctaagaggtatatatgcagtaccttttatacacagaaatacaaatagagctttttctaaggctttcggttgctggttgggggtgggatatatgaaatttcagttgaattctacaggaaagtgttatattagccaaaaacagaaaaatggtttttaaaatgccaatgatttgtaattaaattgtagcaattttggtctcatgatagtgtaatatctcagcaacaatgcaataattcacattgaaacagcgcttccattctgaactctgctctgcaaatgtcttttgggtcccgctgtcaaccaaacttgaattttcttaaaaaaaaaattatgtaactcttatccaggcattttagaactatgcaattgtgatttaaaatgcaactttgtgcttttaaaacattattgaccttttttgtatatggataaacaacttttggttttattatcaatagtactttgcatttatagctattatttttaaaagctcaaaaagttttttaaaatgtcaaattttgaatagtcatcaataagtaattatcaagtttggaaggaaaggttgaaatgactccgtttccttataagc

SEQ ID NO: 77 - DNA, 43632 bp, Homo sapiens
gatcaacagcatcccaaggcagaagaatttttcttagtacagaacaaaatgaagtctcccatgtctacttctttctacacagacacagcaacaatctgatttctctatcttttccccacctttcccccttttctattccacaaaaccgccatcgtcatcatggcccgttctcaatgagctgttgggtacacctcccagacggggtggtggccgggcagaggggctcctcacttcccagaaggggcggccgggcagaggcaccccccatctcccggacggggcggcggcagggcggaggcggacccccacctccctccctgacgggccggctggctgggcaggggctgacccccacctccctcctggacggggcggctggccgggcgggggctaaccccccacctccctcccggacggagcggctggccgggcgggggctgactccccccacctccctcccggactgggcggctggccgggcgggggctgacccccacctccctccgggacggggcggctgctgggcggagacgctcctcacttcccagacggggcagctgccgggcggaggggctcctcacttctcagacggggcggctgccgggcggaggggctcctcacttctcagatgggacggccaggcagagacgctcctcacctcccagacagggtcgcggccgggtagaggcgctcctcacatcccagacggggtggcggggcagaggcgctccccgcatctcagacgatgggcggccgggcagagacgctcctcactttctagacggaatggcagccgggaagaggcgctcctcacttcccagattgggcagccgagcagaggggctcctcacatcccagacgatgggcggccaggcagagacgctcctcacttcccagacggggtggcggccgggcagaggctgcaatctcggcactttgggaggccaaggcaggcggctgggaggtggaggttgtagctagccaagatcgcgccactgcactccagcctgggaaacattgagcactgagtaaacgagactccgtctgcaatcccggcacctcgggaggccgaggctggcggaccactcgcggttaggagctggagaccagcccggccaacacagcgaaaccctgtgtttggtggagaccaaaaaaatacgaaaaccagtcaggcgtggcggcgcgcgcctgcaatcgcaggcactcggcaggctgaggcaggagaatcaggcagggaggttgcagtgagccgagagggcagcagtacagtccagctttggctcggcatcagagggagaccgtggaaagagagggagagggagaccgtggggagagggagagggagaccgtggggagaaggagagggagaggaggattgcattttttaaaaattggaggtaccattgatttaataacttttcagtcaaaaaagactacacaaaatacataaacttttatttatttttatttatttttactttttttttttttttgagatggcgtctcacttgttgccaaggctggagtgcagtggcgcaatctcagctcactacaagttccacctcccaggttcaagcaattctcctgcctcagcctcccaagtagctgggattacaggtgcctgccaccacgcacagctaatttttgtatttttagtagagacagggttttaccatgttggcctggctggtctcgaactcctgacctttagtgatccatccgtcttggcctcccactgcgcccggccataaacttttaaactaaagcatgatctatcgatacattgcagagcttctttcctttagtatctgaaggtttgagtcaaagctgttttcccatctggaatcagttgcccatttggctatccgcccgagcgttgtggtttcctctcctgttcctggcctgcctttgtgactcactctggagatcaccttcgaggttaatggcttgtggaagagttccaagttttatctctgtcctagttggttaaacatcattttctctttttcaagcaagtgaaaagctttcaatagatagatgtttatttcctaagcactaaatgactcataaattaagtccctgtagatttggaaaaactccttaaactgtatctagaggtctagcacttcctagtaggatagacagtcctttctagatactgtaacttttttctgtaccgctttggagtacagtctttatgaagttgtttgtaagcaaaagggaataaaatttaagcctaaaggctgggcgcgatggctcacatctgtaatcccaatgctttgggaggccaaggcaggtggatcacctgaggtcaggagttcaagaccagcctgaccaacatggtgaaaccccatctcaaaatacaaaaaattatctgggtgtggtggcggccgcctataatcccagctactctggaggccgaggcaggagaatcacttgaacccaggaggtggaagttgcagtgagccgagattgtgccattgcactccagcctgggcgcaacaaaaaactctatctcaaaaaaaaaaaaaaatttaagcctaaaattcaaccctgttactacaagtgacttacctgaagttgcagtctgctgaacaggtattttccatacacagctacgtttctctgtagacagcagtgacaattctgtttccgttcatgcctctgcctacctgctggcacatgtctttcaatagcagcagtatgctatatcctgatttcacaaatcttaaaatatgctaaaatgggtgtcttagacccaaggaactgtaagtcttctctggaggcctaaggctgctctgtcagtccccatatccccgggccaggccacgtgaagcaccaaatccactggggtcccttttgcccctacaggtctccctgtcttcctgcctctgtgtcagccaggagctcatcttctgtggctgcacagatgggatagtccgcatcttccaggcccatagcctgcactacctcgccaacctgcccaagccacactaccttggggtagacgtggcacagggcctggagcccaggtactgccctgtggggagagggaatgggaggggcccacccagagtctgtccactggcattcatccatgcttccagatccatctatctgtctgtccatcccacaaatacccatcatgactctcagccctgggcattacaaagcagaaaagtccttgccttccgaggcaagcctcacagtgagaagtgaggctgggtagggggaagaaacagtgagaaaacaaaggaataatatcatttcagatagcggtcagcatggtgaagaacagtgcagagcaggtgtgaatgtggcggagtgtttccatccacatggctgacccctactaagtggctgctaagtgccagccctgggctggaagcaggacatgcctattataatgaagcagcaaaatctctgcctctctgcagtatagcaagggggctcgatgataagcaagtacacgaaaaagataatttcaataggcatgagtgctttggggaacacagcagggactcgggaaggagagtgactggggtgggctgtgctgattgggtgcctggtgagaaggagctgctgtgtggagagctgggtcccagcagttgaggtgacagcacactgggcttgttacgttgcaggaatagtaagggactgtgtggccagagcccagtgtgtccggggaggatggtgggagatgaggccagtgtggggcgcctgtagtctatcctcaggtcagtgggcagttgctggggtttcgggcgttggggtaaatgaccaggccttacatgttaggtccctcagctgctgtgtcgagagtggatagaagcactaggctgtggctttcttctcctttgttgcaagtctgttttatggaattgggggctacctaaccagggggtgccaggtgcctagggctgcctctttgtggatttctggatgctagctcctgggtgccttttccacgacagggcctgaacaggggaactgggtgtcatgaaggaaaggagggggcgagcaacccacaggcagtgttgtgttgtagtagtcgggctcacagctctgctgtcttctgttgtgctctgtgaccttgggaaggtgactatacctccctgtgcttccgttttctcatgtgtaaaatacagtacctagctcttattgtggttgtgagaatttattgcaggtaaaactctcggcctggcacagtgtaaatgctcagtaaactgtagccttcatagggagaccccaggccaagggacagctccccagcctccttaggacacagaggctttttgatcatgcgttggtgaggccaagaagaggtgggacctgagatacatgcctattatctttctatgctcagagagagagcaggagcttgggttgggtgaaatgatgggcgataaatgttcataggaatcaaaaactcaattgctctcggggccaggcaaaaatttccggtttgtagcctctatatgaaaagcaaagcagaggaagagggaagagggaaaagtagaattggagcaggagagatggatggccacaaataccatgagggatggcattgccggggaggcatctccactgtcactagaggtggctgtcactactcagtgacattgatggtgattgattacccatgtggccttgttagcttcctcttccacaggaaggcggaagcagtctacccagatacagtggcactgaccttcgaccccatccaccagtggctgtcctgcgtgtataaggaccacagcatctacatctgggatgtcaaggacatcaacagagtgggcaaggtgtggtcagagctcttccacagctcctacgtttggaacgtggaggtgagccccccccccacccccttgcccctgcttggcctctgcacagttccccacagtttgggaacccattcagtaattccttcagaagatactcattgactccctcctatgcatcaggccctgtcctaggtgctgaggacacagacacaaaatccctgcccttaacaagctcacatttggatgggaaaggaaacctggaaacatcatcagtgaataacacgccaagcagcagtaaccctctgaagaaaaatgaggcggggaaggggaaggggaatgcaggtggtattctagagaggagaggggtcagggaaggcctccctgaggacatatgagcagagacctgcaggaaatcggggagtgagacctgcaactgctggggagaaccacaagcacagaggccctgcggcaggaacatgcactccacagagagctttgctgtggaggtcgtttatgtatttcactgctttttttaaaaaggagttgaagacggggcatggtggctcacacctgtaatcccaacactttgggaatctgaggcgggaggatcacttgagtccaggagtttgagaccagcctgggcaacacaagaccctgtctctacaaataatttttaaaaattagccaggcatggtagcacacacgtgtggtcccagctactcaagaggtggaggcaggaagatcacttgagcctgggatgtcaaggctgcagtgagctgtgattgtgccaccacactcccacactccagcctgggtaacagtgagaccatgtctaggaaaaaaaaaaaagttttgaagtttttattttctgagaatgaatttgtgggtttttaaaaattctctaaagttaaccaggcacagtggctcatgcctgtagtcccagcactttgggaaatcgaagtgggcagattgcttgagtccaggggttcgagatcagcctgggcaacatgaggaaaccccggctttacaaaaaatacataaaaattagccaggcgcgcctatagttgcagctactcggcaggggctgcggcaggggggctgaaaatttcttactgggaatgtttgtcctagagaaattgggttttcagtggccagattcaggatcgtgagaaagaactttgtccttttgaataggcagcattcagcctatgactctggttgaatctgtctgccttcatggggctgacgtttttgttgacagcactttttttccactcaaagaatgttttttaataacttttaaaattcctgtatgaaatttttaaaaatttgggataataggtgaaatattacagataaggctacagtccacattgatgacttccctgcccccagttctgctctctctcgccctcaccattatcaattttattatgggtgtcttcagttgattttctttgcatctccttattgtttatgtatatagctgttcaacaacagtatctgtggatagatcttttcatcagttctagaaaattctcagccaatactgcttctaccctcttctctctctttttttttttcagacggagtttcactcttgttgcccaggctggagtgcaatggtgtgatctcggttcactgcatcctccgcctcccgggttcaagtgattctcctgcctcggcctctcaggtagctgggattccaggcatgcgccaccacgccttgctaattttgtatttttagtagagacggggtttctccttgttggtcaggctggtcttgaactcccgacctcaggtgatccgcctgccttggcctcccaaagtgctgggattacaggcatgagccaccatgcccggcctattcgctctcttctaaggttctatctaactctaaggttctatctgtattcttcatgtttctgaaaataaaaatcacacaaaagatatgtagagtttatcaattattgttagcagctttttttcccccccaagacggaatctggctgtgttgcccagtctggagtgcaatggcacaatctaagctcactgcaacctccagctcctgcgttcaaacaattctcctgcctcagcctcccgagtagctgggattacaggcagccgccaccacgcctggctaatttttgtgtttttagtagagatggggtttaaccatgttggccaggctagtttcaaacccctgacctcaagtgatctgcctgcctcggcctcccaaagtgctgggattacaggcgtgagccactgtgcctggcctgttagcagctattgatgctcagttcctggacccttttatttattgagggttgcaatatggtgatattctaaatctataatttatttttattagttggactacttacgtgaagagatatttgctctcatctgccatttggtcacccagtgctatacttcatataggaaaggcaggagaaatacttgattctttccctttatttaccagttttcaagataatgaattggttccctatcctctaaaggtaactagttttatttaatatcattataaactcatatatatttaaatatatcagatatgttttaatctattgtaattattaactttattggagctcatatcatcccatctttggccagtgagagcctcttaacattggctcctgagccctttggacatgaccctagtatttcttgatagccaccttgctgcctgggatgccaatatgttccagtctcatcttgtacatttcctgtcacacatcaggaatcaaccatttctcgaaaagaccatgtttttttttttgggctgggtgcagtggctcatgcctgtaatcccagcactttggaaggctggggcaggggaattacccgagcccacgagtttgagaccaacctggccaacatggtgaaaccttgtctccactaaaatacaaaaaattagccgggcatggtggcaggcgcctgtagtcctagctacttgggaggctgaggcatgagaattgcttgaacccgggaggcagaggttgcagtaagccaagatcaagccactgcactccaatctgggtgacagagggagatcctatctcaaaaaaaaaaaaaagaaaaaagagaaagagaaggccagggtttttttttagtacaaattgggacttcagaatcacaggttgggtgttagggatgctcatcgctattgggtcgttcttccagaagcctagttcttaaggacacaggggatggtggaattagaatatccccagtaactcatttgctttttcccacattatacatgcaacagtctgagaatggacaacttttcaattctgaagatagttaaaacaattgtaatgcatatgttctctctgttctctccaatttttaaaatagttatactatatttacaggatctgaatatgtagccattatatactatagtgtctcccttttgacccctgtttattttggaatggggaattatatatgtgtgtatatatgtatgtgtgtgtgtgtatatatatatataaaatgataaaatatacatgacatcaagttcaccatttcaactattttaaattgtaccatttggtggcatttagtacacttacagtgtcatgcagccatcattactctctagtttcagaacattttcatcacccacccaccccaaaaaatcctgtatctgttaagcagtcctccccattccccactccccccatccatggaaatgactaatctgcttctgtctttatggatttgcctgttctgaatcttttcttttctctccttctttccttccttccttccttcctttttttttttttttttttgagatggagtctcactctgtcgcccaggctggagtgatgcagtggcacgatctcggctcactgcaagctccgcctcccgggttcacgccattcttcttcctcagcgtcctgagcagctgagactacaggcacacgccaccacacccagctaattttttgtatttttagtagagacgaggtttcaccatgttagccaggatggtctcgatctcctgacctcgtgatccgcccacctcagcctcccaaagtggtgggattacaggcatgagccaccatgccaggctgtttcctttcttttcctctttctttcttttttttttggatggagtctcgctttgtcacccagactggaatacagaggcacaatctcggctcactgcaacctccacctcccgagttaagctattcccatgcttcagtctctagagtagctgggattacaggcacatgccaccatgcctgatgaattttttgtattttagtagagacagggtttcaccatgttgcccaggctggtttcaaactcctgagctcaggtgatctgcccgcctcagcctcccaaagtgctaggattacaggcgtgagccaccatgcctgacctgaatattccttataagtgaaatcatagactatgtgggcttttgtgcctggctttcacttagcataatgttttcaagatttatccatgttgtagcatgtgtcagcacttcatgcctttttatggtggaataatatttcattgtacggatagaacacattttgttctctgttatcagttgacggccacttgggtttttttctaccttatggctgttgcgaataccactgctatgaacatgtaagtacaagtttttttgtttttttttttttgaaacggagtctcactctgtcgcccaggctggggtgcagtggtatgatctccgctcactgcaacctcaggctcccaggttcaagcgattcttctgcctcagactcctgagtagctgggattacaggcacgcaccaccatgcctggctaatttttgtttttttagtggagacacggtttcgccgtgttggccaggttggtctcaaactcctcgcctcaagtgatttgcccacctcggcctcccaaagtgcagggattacaggcgtgagccactgtgcctgacgtagttctttctttcagttacatcactttgtttctgagtttttgtaggttgtttttcataccttggatcattttttaaatatcttttaccttcttttgaaacagtaggcccagcgtggtggctcacgtcggtaatcccaacactttgggaggccgaggcaggtggatcacctgaggtcaggagtttgagaccagcctggccaacatggcaaaaccctgtctctgctaaaaatacaaaaaattagctggccgtggtggcgggcgcctgtaatcccagctacttggggggctgaggcaggagaattgcttgaacccgggaggcagaggttgcagtgagccaagatcgtgccattgcactccagcctgggcgacagggcgagactctgtcaaaaaaaaaaaaaaaaacaaagtaagttatagtttttatctttttttgtgaaaatatgtttctgctgtgcttttttttttttttcttttttaagagtaactattggatttgaccttggtcctttcctgttgttcatttttatgtgataccagtttttctgaaattttagaagttggtgtgcttcaggacagattttccaactacacaagaagaactctgtcttttcttttttttgtgggggtggggtggcatgttttgttttgtttttgaaaaggagtctcactgttacctaggctggagtgcagtggcatgatcacagctcactgaagcctcaacctcataggcacaagcagttctcctgcctcagcctcccgagtagctgggaccacaggcatgcactaccatgcccagctaattttttatttttggtagagatgggatctcattatactgcccaggcttgtttcaaacttgggctcaagcagtcctcctgcctcagcctcccaaagtgctgggattgcaggcttctgttatttttatactgtgttaaaatatggcagcctgctttctgatacttcctttttgtggtcctctttatctgttatgtctcttctttcgtctcaatctcctctttactttatttcttctgtccctgttgtgattggtcaatttcatttctactcttagcagtttctcttcagtgtggagctttgtcctggaaggacaaagttcacaggatcttctccagtccctttaggccttaccccttgcactcaactgctgttggggtggatgaaaccctcctactttcagctgctgttcagtttggcccagtgtgctttccaatgaacacctcttggctactttggaattatcctgttgctgggtctgtcagatgccttattacttctctgtctcccacatgcatgctgatgatatgtaggtcttgtgattggtggtggtttgtcccactcacttgtattttggggtttatgggagtattttgtcactgagttttgctataaatgttgtctgtaggtttgggttttgctatctggttgatgtttttcttatgtcgagattttgggagattaaaaaaattaatgccgctactatcatcttcccagttctcaatcttccgtattttgaaatctctttatatggtggctctttgtccttctcagcttcattctaaatatctttagttttgtctttcagttcacttaattttctcctcagttatatctaatctttggtttttaatgtttttatttttttattattttttttttgagacggagtctccctctgccgcccaggctggagtgcagtggcgtgatctcggctcactgcaagctccgcctcccaggttcacgccattctcctgcctcagcctcctgagtagctgggactacaggtgcctgccaccacgcccggctaattttttgtattttttttttttagtagagacggggtttcaccgtgttagtcaagatggtctcgatctcctgacctcgtgatcctcccgcctcggcctcccgaagtgctgggattacaggcgggagccaccatgcccggcctattttttatttttttatttttatttttttgagatggagtttcgctcttgttacccagactggagtgcaatggcgcgatcttggctcactgcaacctccgcctcccaggttcaagcaattctgctgcctcagcctcccaggttcaagcaattctgctgcctcagcctcccgagtagctgggattacaggtgtgcaccaccacgcccagctaattgtgtatttttagtagagacggggtttctccatgttgaggctggtctcaaactcctgacctcaggtgatccgcccacctcagcctcccaaagtgctgagattacaggcatgagccaccgcgcccggccaatatgtttttattattcatttctagaagctgttctgttttggtctttttcagccctgcttggttaatctttataatttctggttggctgcacacttttaatcttgtcaaaattatcttttagttcttcaaacatattgaatgtagttattttatattctgtctgataattccaatttgggtttttttattttgtttttggtttgtctgtctgtttgttttgagacacagtctcatatgttggccagagtagacttgaactgctggtctctagcagtcctcctgcctcagcctcccaagtagctgggactacaggcatgcgccacctcccctgatttaataattccagtatttaaagtcttgctagactctgttgcttctgctgcttcttgctgatggtacctcgttttcttttgtgcttagtcatgtttgattgagttccacatttcccttggaagtttatttgagggtatgtgttaaggcctaggctgaaggtgggacatggatgatatatggtagcattttgtgtcctttttttttcttgtttatttttagcatagaaggtattgcacgatacctgtttatctttaacttactttttttttttccatgaaaatgcaacagtaagtcatagtgctgtcattgagtcatcctttgccttgtcctctgggaactgtaggtgtatcctgagtttgaagaccagagagcttgtttgccatcaggatcctttctgacttgttcttcagacaacaccattcgcttctggaacttggacagcagccctgattctcactggcagaaaaacatcttcagcaatgtgagtggcttcctttgtgaaccatctttcaggaggaacaaagacctactgtaagcttgaatgcaggggcaggagagagtctgatggaccctagatgttaggttccatgagggcaagagccggcaaccaaggcaggtccctctctgcatcactgcctcttgtttctctttctcctgccccctctctgaggtggcacgctctatcctctctgattctttgccagttggctcctgctctgcagatgtgtggacgtggccactcccggcagcccaacacacccagcccaggtgaaattgcttcctaagtcttgagatggaattccctgggagagcacctgatgagccagcccattcagctgccacacagtgaggcctcacgggggtatgggcagaatgctggcgagagccatgatgggaggctgggaagaaaagtttgctgaggaaattttggttagtattgcaagcccagtgagagggcgtctctggggagctgagacctgagtcatgcattcatttattctgcagacacttattaacgtccatgccaggtgcttggctacatgctagggacacaacagtgactaagactcttctgtcctgtggcacacacaatctagtgagggccgacagtgaactgacagccgaccatgttaatgcacaatcacaagtgcgaaaagcactgtgaaggaaaatgtgcagggtgctagtaggacatagagcagcagcatgtgaacttatctgggacatccggagcagcttcccgcggaagggacagctaagttgagattgggaagagtaaagagggaaggggagagggtctatacttagggaatagcctgtatgaaggccctggggtgggaaacagctgggtgaattggaaaacctgaaagaggccagtgtgattggaactaaaaagaccctccatgcaggaggctgtagcaggtgccctgcaggtgcacctttattactcccctcattccctacccagtgctaccatcgtctcctctgtacctgtgacatacatgctgtttttggctgcacacaatagaaaaactcaaaacaagaggtaaaagttaggtttctgactcatgaaagtagtctgaaggtaaccagtttagaccgttctgcaggaagcccttagggatccaagggccttccagctctctactctgtcatttgagggagcaggctatgtcctcatgacccagtgtggctatgggggctcctgctatcatatctgagttccaggctgcaggatggagaaaagacagcagaagaatacgtgcttgctttatatttaatagttcagaatttattcacatattcttatctagctgcaggggaggcaaggaaataattattctgattggtgaaactcccagctcaaaattagagttgtattactaacgaagaagagactggctatggagggacacgatttcagaggtgcttctgagctgctcgtgctgacctcagccctgtccttcctgcagaccctgctgaaggtcgtgtacgtggagaatgacatccagcacctgcaggacatgtcacacttcccagaccgggggagcgagaatgggacacccatggacgtgaaagccggggtgcgggtcatgcaggtcagtcctgacggccagcatttggcttcaggcgaccgaagtggaaatctgaggcaagtgggccctggcagtgtccagtgtacacctcccagctccagctcaggttctcagggcagtgggcagaagccctggccttggcacctcctgctgcccattgggaatgaggggctgtgaatagtaatcccatgaacagctcccattgggaacttaagctcgtaagaggcttccagaagggctgagagcagagtaactaccaggacctcagcagctagggtgtgcagattttgcctatagagtgtacaggcaagctcacatgactctagggcagcgtgacactttcaccagccacatggtaccagtgctgaactgtcaccgaagatgccagctggaggagggtcctggtggctctgggagaggggctatgagggtgggatagctgagagttcaggctgcttatgtgccctgttgaggtttggcaggatgttaccaacccagtaggtgctagtgggacataggccctgttgctgggaccaggtttaagatgacaaatgacagctgtgaccacctgggtattggagccactggggaatggaggagagttgggggaaactagaggggacataaaggggcagcagccaccaggcagccccaggagagtaggctacaagttttcaaactttcctgttgtcaagaagagcagaaagtgccgatttttttctgtgaaattcgataatttttaaatattggcacctgttttgatatcagtcactgtatgagaccagctcagtgtgtcagtgagctgcttacattgacatggcactgtctggagtggcaaaacggtaccaagagccaacatggggatagtgctcttcccccttggtgggcgctggcctgagcactgtgttgactgatttaatcctctcactgacccctgatgtaagtgatgttattggcacaaggtgtctggagtaagatcacacgggtagaatgaagaagctgggatgactcgatgactgatttcatttggggagaatcaggaaggtctagatttgagactcttttaacaatgagagactggaatcaaatgttctcatccatagctcctatcctggactatgacctctggcccctagcccctggcccctgtcctaccccagggaccacctctgatgcagccctacgtaaacacctgcccccctagaagactgtcctagatccctggggctctgttctggcccaggcaccacaaggggctgctgcctgctgaggtgctccctggttcaacacggctccctttacgatggcaggtttctaaatgagaaaagtggttgtgcatgtctagagtatttggccatgataaggggttctcattgttggtggcctggccattctgacctattctagaagtggtagagcacatggggctggggtgtggggcttcagcgggcggtgtgtgtctcccaggatccacgagctgcacttcatggacgagctggtcaaggtggaggcccatgatgctgaggtgctgtgcctggagtactccaagccagagacgggtgagcccgcagcaggggtggaatgggggtcaggcagggaggcagcccccctggcagggccacagaaaggggtagttggtgtctggtgggactgtggatgacagctgggagttttgtgttcggtaagggcccctgtagctggaccctgagaccagagtggctgggacttcagaaagcaagacacccgcaggcaggactcagcttgacttgcccgctgctggtgccagcacccaagccaaaggggtggatgtatgaatgagtgaattgtgaatgagaagatagattgattgttaggcattattttcaaaaagtttgaagcctatagaaatattgggagaatattataatgaacaccccataggcttcacccaaattcctcaattttttttttgagatggagtcttgctgtcacccaggctagaggggagtggcaccatctctgctgactgcagcctccacctctctggttcaagtgattctcgtgcctcagtctcccatgtagctgggattacaggtgcctgctgccatgcctggccaatttttgtatttttagtagagatggggtttcaccatgttggccaggttggtctcaaactcctgacctcaggtgatccgcccgccttggcctcccaaagcgctgggattagggcatgagccaccacacctgacctttttttttttttttttttttttgagacaagagtctcactctgtcgccctggccggagggcaatgacgcgatctcagttcactgcaacttccgcctcccaggttgaagcgattcccctgcgttcaagcgattctcctgcctcagcctctcgagagtagctgggattacaggcacgcccccaccacacccggctaatttttgtatttttagtacagacggggtttcaccatgttagcctaggctgaaggctaggaccatagtagggtctccagacctcatggtcctcttcattaaaacaacagaaaattccttctgggccatcagatgagatcatgagataggagaagatttccaagtgaagatttcgtttgtttcaagacagagtcttgctctgtcacccagatgatatatggatgatatatggtagcattttgtgtcctttttcttgtttatttttagcatagaaggtattgcacgatgctggtctcaaactcctgacgtcaggtgatccacccgccttggcctcccaaaatgctgggattacaagcgtgaaccaccatgcccggctcctcaagatgttttctaggctgggcacggtggctcatgcctgtaatcccagcactttgggagttacagagttggtggagttatatcctgatgtgattttccccatgttcttctttcgttctctcatcccccatgctgtgtgccccaccaacttgtcttgaaacatatcttcactcggttcgcctctcctgatctcccctctgcctcaggtcatgttattaggcctcagacatagcaagtgaccagagtagggaaggctggtggcagatgggagtctggccacaggcagtcaataggacctgaacaaggcccaggtagccagacctcagagggtgagaggacactggttttggaagaggctgagaggttgccagggctttacccagcacagacccagcaggcaagagcgctgggctctgctggggcgtctgctgtggatgtccctggaggagcgtccatgcgcccatcgagactcatcctccctgagctggtggtgaggaggtgaaatgccagggtgtgggggctctgggaaagaccacacagagctaagggagtggcccttgccaggcttgggccaagttggctacagttgaagaaccaaagaccccttctccgaggactgggcagcttggtcacactgcccttctgggaggccagggcacccacgcagccttcaggaaccagtctcattctctcctctcacagggctgaccttgctggcctcagccagtcgggaccggctgatccatgtgctgaacgtggagaagaactacaacctggagcagacgctggatgaccactcctcctccatcaccgccatcaagttcgctggtgagcccctttcttcccgctccctgcgccttgctagctaccctgctaaaaaaggattcattctttcaactctcctgtaaaatatatatccaaacaagtgaatacagtatctgtgtacagtatacagaataatgactggggccgggtgtaatggctcacacctgtaatcccaacactttgggaggccaaggagggtggatcacctgaggtcaggagttcgggaccttcctagacaacatggtgaaaccccgtctctactaaaaatacaaaaatttgctgggcggggtgttgtttctgtaatcccagctactcaggaggccgaggtgggagaattgcttgaacctgggaggtggaggctgcactccagcctaggcaacagagtgagaccctgtctcaaaaaaaaaagaataatggccaggtaccatggctcacacctgtaatctcagcactttgggaggccaaggcaggtagatcatgaggtcaggagttcgagaccagtctggccaacatagtgaaaccccatctctactaaaaatacaaaaaaattagccaggcatggtggtgtgcacctgtaatcccagctactcgggaggctgaggcaggagaattgtgtgaacccgggaggcggaggttgcagtgagccaagattgcgccagtgactccactccagcttgggtgacaatgcgagactttgtctcaaaaaaaaaaaaaagaagaatataggccgggcgtggtggctcatgcttgtcatcccagcactttgggaggctgaggcaggcagatcacctgaagctaggagtttaagaccagcctggccaacatagtgaaaccccgtctctactaaaaattcaaaaaaagtaaccgggcatggtggtgcacacctgtaatcccagctacttgggaggctgaggcaggagaatagcttgaatccaggaggccaaggttgcagtgagccaaaattgtttcactgcactccagtctgggtaacaagagcaaaactccatctcaaaaaaaataaaaataaaaaataagctgggcgtggtggccgaagtgagtatccacagttcttaggagcaaggtttgaactaggacgttgttgatagcagagactgttctaattgctcatggtcgtaatattgttaaatacggtacttggattcaccacgtgcaggttaagaagcagaacattaccagaggcttgcaggccttctctgggtccctcccaggttacccttcctcccttatatggggctcactcccttctgtgagccaatgactcctccttgagcaacatctaatacttgtatgtcaggcctggaccctctcaaatgtcctgtcatgaaggagcatgtgtgatgtgcccagactcagagttttatatttgttctgtcatttcatcctcaccaaactgttattctgtaaagaaatgagacggccgggggcatctcacgccattgcactccagcctgggcaacaagagcgaaactctgtctcaaaaaaaaagaaatgagaataataaaagcaagaatgtttctaatgcttaccatgtggcagtccctgttccaagggcttcacatcactctccagagaaggaactgtcaccatgcccattgtacggaccggaagttgaggctcaaaggggaggcccaggttcagagcagtgtttaacagctttgaccttggcaccagagaatgcctgggttcagtcctgcccctgtcctctctgtgtgccttgggacaaggactctgtgaacctctgtgttcatgcttgtccagtgggatgggtggtgagcattcaggaagacccgctacatgcatggggcctggcccaaggctcatgtggatcttgcagttgatcctgatggcacgagcctcccagcctgtctccactggtcgctgctgcagtcctgcctctactccgctactcaagtcacctatctcaatcccagactggagagggtgtcccttctttgtccccagcctttgtttctctatatgcccttgctctgcagagcctgccttggccacagctccacctgtgccccctcacacgtacagctcataccttacagagtcccacccagacccagcacccacctcaccacctttaggaagccttgatcccagcacagttgattgatggctcttgcagtggagttccccagctagggtcccctgcccatgtggcccagccctgcctaacacacagcgtcctcctcccctaggcaacagagacatccagatgatcagctgtggggctgacaagagcatctactttcgcagtgcccagcaggtagggtggcatggcctccttgggggctggggtggggggttgtcggggcattctctgaaggtcctgccggccctgccagggttcggatggactacactttgtccgtacccaccacgtagcagagaaaaccaccttgtatgacatggacattgacatcacccagaagtacgtggccgtggcctgccaggaccgcaatgtgaggtaaggggtggccctggacccttagctggcctggtctgccttgtcctaggctgtctgctttcctccctctgttcctctggtccccaagaagctgggaaggaattgagggacccagcaggtgttccttcttggtttttttttgtttttgtttttgaggcagagtcttgctctgttgcccatgctagagtgcagtggcaccattttagctcactgcaacctccacctcctgggttcaagtgattctcctgcctcagcctcccaagtagctggaattacaggcgcctgccaccatgcctagctaattttttgtatttttagtagagacgaggtttcgccatgttggccaggctggtctcgaactcctgacctcaggtgatattgcccacctcagcctcccaaagtgctgggattacaggcgtgagccaccgtgcccggccaccagcaggtatttcttagaagctgggctctcccaagcctggcctccaggtcagcagagggctttcttctggctctccctagagccggtgtgggatgactaaggtgctgatgtggcacataaactccctcattcacccgtattccctgagcacctaactgggctggatggtgctgggatcatggcagtggccaggatagccccaggccctccttcatggagctcacagtccagtagaatggacacggccacctcacagccacagacagtgacagagtggtcagagatgggggagcccaggggccctgtggagacacctgaccccacctgcggatcaagcaggacttcctggaggaagagacaccttagcctggggaggatgtggaggagcgagccagggggaggcagagagtgagtgtgcagagggcaaagcagtgcaaagaggctctgcaccccttcccagttctttctcatgcggtgccaagcactgagcttgcagtgtgtgggggagatgaacattaactcagtggataccccaggacaacctcagcttgagatggggtttcagtttcagtctaggcatcagatggggacaagaggtagcagggggcttccaggggaggggaggacagcaagagccagagaatgaggtggtggggtaggcggggccctgttggccgcaacatgcccctacttccccagagtctacaacactgtgaacgggaagcagaagaagtgctacaagggctcccagggtgacgaagggtccttgctgaaggtgaggagttggagacccctgtctgtctgctgccctgatgggccacctattgtgacggcccacacctgagacctgtgcccttggtccttcctcagtgcaccgcgctgcccagcaccttctcaggcctggttaaacaaggatgcttgcgagagggtggggagggtgaccccagctgtgtttcctttatttacagagcccttccccaagtggggcgtctaagtgggttccattttgagtggcagcagggtatggtgggaagaatcagaggcatgaactcccctcctggtttgcccacaccagccacgggtcactcaggacaaggggggaccttctcagagcctctggtctaggacagttatgggttcaggttctgcctcaggctgactgtgtgaccttgggcaagcatcatctcttgaaatgcacacagacagcttgtctcatagacttgttctctggaggagttcagtttgcacatgttcagtgcttagcacagggcctggctactgttgttactgctgcggtggttgttaatttcttcacgtgtcgaatgggagcgggagctcctgccctgccagagtcccatgtgctgtgcatgcagcacgggggagggaggggcccaggcctcatcataaggaagaagcaggcagctggagtgacatgtgggtccctttcctggcaggtccatgtggacccctcaggcaccttcctggccaccagctgctctgacaaaagcatctcagtgattgacttttactcgggcgagtgcattgccaagatgtttggccattcaggtgggtgtgcctctctgcttgggatgcctccccacccgcccacaccctctgactccgaaggcaagtgcagcctctctgctttgtttgcagaaattattaccagcatgaagttcacctatgactgtcatcacttgatcacagtatctggagacaggtgggacatggacctttgggagagttgtggctcagataccatgagcactgcactcagcctgcctgtgtagagagcatttctaaactgcccagtttggattgtgggagtcttggtgtcacacccagccctgagttcaaataccagctctaagctgggcatgatggctcacgcctgtaaccccagcactttgggacgctgaggcgggtggatcacttgagctcaggagttcgagaccagcctgggcaacatagcaaaaccctatctctacaaaaaattagccgggtgtggtcatgtacacctctagtcccagctactcaggagggggaagatggcttgaacctggtaggtagaggttgcagggagcacagatcatgccagtgcattccagccttggtgacagagcaagaccccgtctcaaaaaaaaaacaaaacactaaaaaaacatatcccagctctgccatttattttcttgtcaccttgagcaggttatttcccctgagcctcagtttgctcccctgtaaaagacaccaccgtttacatttaccttaaaaatggtgtgatgaggccgggcgcagtggctcacgcctgtgatcccagcactttgggaggcctaggtggatggatcatctgaggtcaggagttcaagaccagcctggtcaacatggagaaactgtgtctctactaaaaatacaaaaattagctgtgcgtggtggcaggcgcctgtagtcccagctacttgggaggctgaggcatgagaatgacctgaacctgggaggtagaagttgcagtgagctgagatcgcgtcactgcaccctagcctgggtgacagagcaagactctctcaaaaaaaaaaaaaaaagaaaattgtatggtgagaaatgaatgagatgatatacatacattctttagcacatgggtggtactcaaggaagtcccttttgtcactccctttgatttaccccagttcttccccacagcccccttcctcaggtcttgaggcctccagaacaggccctggtttgctgggatgccccagacctgggcccagggtgtggatgtggcaagtccagcacccctgcactaagcggataggggtgtgttttccaggagcatctggagaatggggtccaggctgtggtgtgggtggcttcagggtcagccacggcagcggctcccatgcttactcttcctctgccttgtgtgtctctctttgacctccgcagctgcgtgttcatctggcacctgggcccggagatcaccaactgcatgaagcagcacttgctggagattgaccaccggcagcagcagcagcacacaaatgacaagaagcggagtggccaccccaggtcctggcagcccctgcctgtccaccagagggatgagtccctgccagggccccatggagtgatgctggggacacagtggtggccaagacagccctaggccctgcccttagcacactcacagctgagtaggggagacagactttgaatatgcagttacagtaatagatacaaaaaggttttgtggatttttttaattttcgtaaataatagagacagagtcttgctgtgttgcccaggcttgtcttgaactcctgggcccaagtgatcctcccaccttggcctcacaaagtgctgggatcacaggtgtgagccactgcacccggctatgagaagggtattaaagtggaaaagcaaagtgtttggcgagcctctcagcactgtgatgggggatgccccaagcggctgtgggaacagagcagtccctgaccggccagccaaggggaggggtgggtagacaggggatctgaggggagggctgcagtggggccacgtgtcctcttactcccacgtgaaagctgtagcttcacttacttctttgaatcttctaaatatatttctttcaagtctttatgtagcaaagccaattttatttgcagagaactcatgttctggtttttgatttgaggttttggtttgggtattgctcattttgagtgggaggttttttggttttcttctcttctgctgctgggtgtgtctgtttttgccattggctccatgtggctcccagggcaatgtggagaccaggccttgacatgggccactggtcctgaggtcctgaggtggtgttagagatatcttgcttttgaggctcccactccacccccaagctatgaaccagggccctggcttcagtgcctgcctcatgccaagggtgttttagtttcccgtactcgggaagagccaccatcattgctaccacctacaggaagcccagcacaggactgcagccccgctgtctgcttggctttctgtcccattgctgtggccctgagagtttgcattcgtttgtagcctggcctttgttaatctcatctattgtggtgatgtgtttctagtggggagacggcatcaagtgagagacttgccagcaccatcttgaccagcagccaagaatatgttcacatggagcttagcacagggcccagccctaggcaagtccccaccaccagcccatttgcctgtattctctccttaccatcctcattcctggctttaggcaggatacgtatgtgtccacacctagtgagattcactccctgagccctggagagcaaacagaggatgatctggaggaagagtgtgagccagaagagatgctgaagacaccatccaaagatagcttggatccaggttggaaaaggggccctattttgaactatgtcagtgtagggaatcattgctgggttttgcccatgaccttgtttacagggcctggcacatattaaaactcaggagtcgacagggtgcggtggctgatacctgtaatcccagcactttgggaggccgaggtgggtggatcacctgaggtcaggagttggagaccagcctgaccaatatggtgaaaccccgtctcaactaaaaatacaaaaattagccgggcgtggtggcgtgcaactatagtcctagctactagggaggctgagacaggaaaattgcttgaacctgggaggcagaggttgcagtgagctgagatcgcgccactgcactccagcctgggcaacagagcaagactccgtctcaaaaataataataataataataatataaataaaataaataaaattcagtaatcaggcttagcgtggtggctcacacctggaattttagcactttgggaggctgaaatgggagggtcacttgaggccaggaggtcgagaccagcctgggcaacatagcgagagcccatctatgcaaaaaaaaaattttttaaagaaattagccaggcatagtggcacacatctgtagtcccaactacatgggaggctgaggcaggaggatcacttgaggccaggagtttgagaccagcctggcacgtaccaagaccccgttcctacaaaaagaaaaaaattagccaggcctggtggtgcacacctatagtcccagctacctgaaaggctgaggcaggaagatcgcttgagcccaggaattccatgttataatgagctatgattgcaccactgcactccagcctgaataatagagtgagatcctgtctgtagaaaaagaaagaaactcaataatcatatcagtcaagactctttcagtataaaagcaaccaggcttaagtcaggaagaggattttttggtgcctgaaaattggagaggattagctttcagcatggctagatccagatagacagatgatgttaaaaggaagatttttttttgtatcttttggctctgcttttcttcatgttggctttgctgatggacagactgtccctttactaggggaaaagatacccccagcaactacaggcttataaaactccatagagaatagaacacctctttcctatagtagctcaagcagagtcttagggttgtgtggctcatgtttctggtatctgctgtacccacttctgagccagttgttgtagctgtccacatctcagcatgtgatcacttctgagggcagagactgtagtcagctccatccactcacaccacctgaccaggcatcaaagatgtgtttgaggccgggtgtggtagctcacgcctgtaatcccagcactcagggaggccgaggcgggtggatcacctgaggtcaggagttcgagaccagcctggccaacatggtgaaaccccatgtctgctaaaaatacaaaaattagctgggcgtgatggcgtgcgcctgtaatagcagctacttgggaagctgagacaggagaattgcttgaacctgggagacggaggttgcagtgagctgagactgcgccactgcactccagcctgggtgacaaagcaagactccgtctcaaaaaataaatgaacaagtaaaaataaattgaattatgttgcggatattgtccggaatctttttcctctgcaaagtctctcatctacctgtatgttggtgaatacaaagcagacgcctgcgaaattttaagttattcccctccaggtggccatttaggtttttcctgattgcacatcactgttaatgaggctatggagtggagaccactcctaagcctcctcgaaatgtgaggacttctccaggagagagtctgaggagtagcaccactggatcctggagttattttattttactttaaaaaagttgttttattattttatttcactatttttgttgcccaggctggagttcaatagcacaatcatagctcactgtagccttgacctcctgggctcaagcaattttccctccttagcctgtggagtagctgggaccacaggctcaagctcccacacccagctaaatatgtgtgtatcaggggatggtgtgtgtagagacaaggtctcactgtgttgcccaggctggtctcaaacccctggcctgaagtatcctcccacctcgacctctcaaagtggtgggattacaggcttgagccagtatgcctggcctttattttaaaagagaaccccggctgggcgcagtggctcacacctgtaatcccagcactttgggaggccgaggcgagcggatcacgagttcaggagatcgagaccatcctggctaacatggtgaaaccccgtctctactaaaaatacaaaaaaaaaaaattagccgggcatggtggcgggcacctgtagtcccagctacttgggaggctgaggcaggagaatggcatgaacccgggaggtggaggttgcagtgagccgagatcgcgccactgcactccagcctgggcaacagagcgagactccgtctcaaaaaaagaaaaaaaaagagaaccccaagagttctccaaacccagttactgccccaccctgcattgcattaggctctccattgtccccacacttttcctgccatcctttggtagtattaagctttttcacctcggtcagtctcgtgagtcaaatatcgcatcccacggtttaagtttgcatttccctaacccccggtgctgttgagccttctgacttctgggttgtggtgttgcctctttggggactgcccggttatgtatgtggcctgtttgttgggttgtttgtcctcttttcatggattctgtgtctttccagatcctcgttgcctgctaaccaacggcaagctgccactgtgggcaaagcggctggtaagtcttcagggagagggttgctcaggggctggcagaggaaacgcctccccagctctgccttctggaagccctttttcctttccatgtccctcttttccctggagaagccctgtcatccttccaggctcagtgagacagccctttgttcatgatcagtgctctctgccaggcattgttctggatgtcagggacacaacagtgagcaagggaaacaaaagtctctcccttcacaggctcacttgcctgtgtgggcgaggaacaatatccccattaaataagtaaatgacgtagtaggttgggtgctgataagtgctgtggagggaaaagaatcaagaaggaaaatacgtcagccaggtgcagtgatacgtgtctgtggtcccagctactcaggaggctgaagtgggaggatcacttgagcccaggaggttgaggctgtagggaactgagaaggcaccactactacactccagcgtgggcaacagagtgagatcctgtctcaaaaaagagaaaaagaacaggggcccagcacggtggttcatgcctgtgatcccagcactttgggaggccaaggcaggttgatcacttgagcccaggagttcaagaccagcctgagcaatatagtgagaccccatctctacaaaaaataaaaaaattagccaggcatggtggtgcatacctgtagtcccaggtactcaggaggctgaagtgggaggattgtttgggccagggaggtcgaggatgcagggagctgcactccacagcactccagcatgagcaacagagccaacactttgtctcataaaaaaaataaaaataaaaaagaaaataaggagtgttggggggtgtcagttttaagtaaacaggaaaggcctcattgggaaaatgatgtttgagcagagttgaagcaagtgagacaggcagatactgggacgaatgttctagtcataacagcctatacgtgtaaaagccacgaggccaggagctcgagaccagcttaggcaacataatgagactcccatctctacaaaagattaaaaatagccaggcatggtggtgcacacccatagtcccagctactcaggagcctgaggcaggaggatcacttcagcccaggagttggaggctgcagtgatcgtgctactgcactccagcttggatggcagaacgagaccttgtctcttaaaaaaaaaaaaagaaaaagagaccgggtgcggtggctcacgcctgtaatcccagcactttgggaggccaaggcgggtgtaatccaaggtcaagagatcaagatcatcccggtcaacatggtaaaaccccgtctctactaaaaatacaaaaattagctgggcatggtggtgcatgcctatagtcccaactactggtaaggctgaggcaggagaatcacttgaacccaggaggcagaggttacagtgaaccgaaatcatgccactgcactccagcctggcgacagagtgagactccctctcaaaaaaaaaaaaaaagaaagacaatgtggattataagagacagaataagagaggtgaatgaaggatgatcccaaggttggggcatgagtaactggaaaaaacaactgaaacagggaatctttaggaggagcaggtttgtgcagaggaaatgagttgagttgtcagcatgttaactttgaaatacctaccagacatccatacagaaatgtagagcagtcacatgtgcaattctgaagtttcagagaaaagttcatgaatcccagctgggcattcccagcactttgggaggccgaaacaggattccttgagcccaagggtttgagaccagcctgagcaacatagtgagagtccacctctaccaaaaaccaacaaaatgggctgggcgcagtggctcatgcctgtaatcccagtactttgggaagccgaggcgggcggatcacttgaggtcagcagtttgagaccagcctggccaacatggcaaaaccccatctctactaaaaatacaaaaattagccaggtgtggtggtgggcacctgtaatcccagctactctggaggctgagacaggagaattgcttgaaactgagaggtggaggttgcagtgagccaaggtcacgccactgcactccagcctgggagacagagcaagacttcgtctcaaaaaaaaaaaaaaaaaaaaaaacagagaaaggttcacgctggagatatgtacctggaagttgtttctgaatggtattgaaagccaagagtccagatgggctgtgtgaaatgtccgtgtcgctccctgcagtgagtgagcactcagccagttgcctgactgtccgatatccttcaagctaggggacgatgatgtggcagatggcttggccttccacgccaagcgcagctaccagccccacggccgctgggcagagcgggccggccaagagcccctcaagaccatcctggatgcccaggacctggattgctactttacccccatgaagcccgagagtctggagaactccattctggattcactggagccacagagcctggccagcctgctgagtgaggtacacacttccaccgcagcctggcccatagccccggcaccgtgacggccccagggcctggcgccttaggctgactcccactccatgggggcagggaggattacatgagatggtgaagggcaggagggtgagccccaggtctgttgcacagcaagacttcccaaggcagacagggagtctttggaaagtgggtcacttgggggttaagagcttggatgctagagcaggcttgtacccaagtgggggacatttgggtagatcgagccctgaccctacccattcctgttgtgtgacctggagtaagaggcttacctctttgggcttcagtcttctaaaaagtagtcataatggggtcaggggcagtggctaacacctgtaatcccagcatttggggaggccaaggcaggaggattacttaacgatcacttgaggagttcaaggccagcctaggcaacgtagcaagatcccacctctacaaaaatattttttaaatttttttgtttgttttgtttttaaatggtaataacaatctcttctgccccagagggcttttacaggaatccatgcttaagtatagggcctgggctcttagaggtgcccgtgcaactttagctctttctctactattttccaaacaaaattcatttttatcctatcctataatttgtcatcttcattgtggtataatatacatccagtaacatgcacagattttaggtatacagcttgatgaactatctgtgtaattcacgtgtgtccactaccctgggcaaaatctggagtgttttctacctcatagaaacccccttctgcccttcccagtcaggtccccgcaccaggataaccagtgttctgacctctcaccaaggactgggtttcctattcttgaacttgatataaatagacacgtagagggttgggcctcctatttttggtgccacacctcttcctcatctgtaaagggactgataatgcaggggcagaccaggacaagctggttgcgagtggagggcatggcacaggccctggttcacagcctccagcagtggggctgctggcatggttcctggcgcactgttggtggccccagccatgcctgcctcagaatggctgtgctgtcttccccatagtcagagagtccccaggaagctggccgcgggcacccctccttcctgccccagcagaaggaatcatctgaggccagtgagctcatcctctactctctggaggcagaagtgacagtcacagggacagacaggtgggtgtcctttccaccaagggagccttagttggaggaacccccagctgatagctgcatcctggaagaagtgctctctgccttcccagtgggcttgtgggagtggggacagttgaggcctggatggggcaggagcccagccttagttccctggttccaggtggggtacaggagggcctgacctgggggaaggagggggcatttggaggaggcggggaggctgtcgcagtgctcctgcaggagcagcgggtacaggtgcctaggggctccgggtggggctagctgttgagtctccagctgaagtccttgttccctctctgcccccactggcactgcagccagtattgcaggaaggaggtggaggccgggcctggagaccagcagggcgactcctacctcagggtgtcctccgacagcccaaaggaccagagcccgcctgagggtgagtgcagggcaggcagggaccctgtgacagtctgtgcgttcagccaagcccctttctgggcaccgatggtgactttgacccagtactgaagctcagagtctgtcgaggaagacacatgtggtccctgctgctgcctgaggattctgggcccagctgcctacagctgagagcccagctctgccacctccttgatgtggaacttcccttattcataaaatggggggcagctgctcttaccatccctcctccagatggggaaactgagcccagggaagggtagccctggccctggctcaccagaatggtcaggctgtgggctcctgaccccgactctgtccttcagactcgggggagtcagaggccgacctggagtgcagcttcgcagccatccactccccagctccgcctcctgaccctgcccctcggtttgccacgtcgctgccccatttcccaggtaagcaggggccagacacgcaggggactcgctgctcgggcctggcttagggccagtcacaatgtctaagcacaggccctgcacttggagcccactgagcctggaagacggggatccctgcttctcagcctgcgggcaacagggcagggatgggtggggcccgctttctccatttcaggtggcgtctgctgtgactcatggtgttggctcctcttgtccctcccctccttccctgtcaggatgcgcaggtcccacagaagatgagctgtccctgcccgagggacccagcgtccccagcagctccctaccccagactccggagcaggagaagttcctccgccaccactttgagacactgactgagtccccctgcagaggtagggccctgcctcacccacacctgccgaggccgtctgtgcagcctgggcacagcattggcgtccctggagttggctccccagcagggccaggagggtgagtggagagcaactgcttcgttttttttgagacggagtctcgctctgttgccaggctggagtgcggtggcccaatcttggctcactgcaacctccgactccctggttcaagcaattctcctgcctcagcctcctgagtagctgggattataggcatccacaaccacgccctgctaattttttgtatttttagtagagatgaggtttcaccatgttggccagactggtctcaaactcctgcctcagatgatctgcccgccttggcctcccaaagtgctgggattacaggcgtgagccaccgtgcccggcccactgcttcactcttgacctgagcctcacgatgcctcctcacccactgcccctgctcgtaccctgtgtctgtacataagggtttctggggagtgccccgctgggctgtgggctggcctagggccagggctgctcggcgggaagggttatgagggtcccctcgggatcttcccctagagctcttccccgcagctctgggagacgtggaggcctctgaagctgaagaccacttcttcaacccacgcctgagtatctccacgcagttcctctcaagcctccagaaggcatccaggtagaagctggccaagcactgcccaccctctggctcctcaacagtgccccagggcaggctgaatgagaatcatcccccctgctctcctccccacaggttcacccataccttccctccccgggcaacccagtgccttgtgaagtctccagaggtcaagctcatggaccgaggcggaagccagcccagagcaggtactggctacgcctccccagacaggacccacgtgagtattgggcccacctccgtcagggcacggggctgggaaccctgaggccttgtcctcacctcagagctgtgcctgcaggtcctcgctgcagggaaggctgaagagaccctggaggcctggcgcccaccacgtgagtgccccagtcccagacggacagtcctgggtttctcggcgagtggccggatgtccagcctagctgtggggcgtgggggccctagccatcagttctgtgtggtggagtcagtgccatctgcttccgttacagctccctgccttacgagcctggcgtcctgtgtccctgcttcctccgtgctgcccacagacaggaatctcccaacgcccacatctgcacccaccccaggcctggctcagggtgtccatgccccctccacctgttcctacatggaggccactgccagctcccgtgccaggatatcacgcagcatctccctcggtgacagtgagggccctatcgtggccacactggcccagcccctccgtaggccatcgtccgttggggagctggcctccttgggccaggagcttcaggccatcaccaccgcgacaacacccagtttggacagtgagggccaagagcctgccctgcgttcctggggcaaccacgaggcccgggccaacctgagactgaccctgtcaagtgcctgtgatgggctcctgcagccccccgtggatacccagcctggcgtcaccgtccctgcagtgagcttcccagcccctagccctgtggaagagagcgccctgaggctccacggctctgcctttcgcccaagtctcccagctcctgagtcccctggccttcctgcccaccccagtaacccccagcttccagaggcccggcctggcatccctggcggcactgcctccctcctggagcccacctccggtgagtacagccctggagcaaggactgtcccctaagctcatcctgtgtgctagttggctcagctccaaagatggatacttgacctggccacagggactgtgccattcattcattcgtgcattaacttaaatatttaatgagcattacatgttgggctttgtgctaaaccctgggacatgggacatggtggtaaacaacacagagaactgacagcttcaatggggacaatgcccagactaaacctttaaggaacccgtcatatgtatcacgaagtgacacatgcttaggagggacagaggagggcgagggagtgcagggtggggacaggggttgggattacaaaccagaagataagaagaggcttcagggaggaggctgcattggagcagagacctgtaggagtgaaggggagggagccttggggacccagagaagtgttccagacagaagtacagcatggagtccacccagtcgctctggccgctcacaccaatggaatgcagctcatcttgctcattcccttctctctaccccaggtgcacttggtctgttacagggcagccctgcccgctggagtgagccctgggtgccggttgaagccctgcccccatctccccttgagctgagcagggtggggaacatcttgcacaggctgcagaccaccttccaagaagccctcgacctttaccgtgtggtgagctaagccccagagttgggaaagggttgaggggtctcttgagaccgcccggccttggtggcccctgacaaggctggcatcccttgcagttggtctccagtggccaggtggacaccgggcagcagcaggcacggactgagctggtctccaccttcctgtggatccacagccagctggaggctgaatgcctggtggggactagtgtggccccagcccaggctctgcccagcccaggacccccgtccccaccgacgctgtaccccctggccagcccagacctgcaggccctgctggaacactactcggagctgctggtgcaggccgtgcggaggaaggcacgggggcactgagggcgcagcccctccaccgcagccctgctgcttctgaggacttaggtattttaagcgaataaactgacagctttgaggaatggttcctggtgtctgtttgggcctatccacaaagccctcttcaagtggaagtggggagggagggtagaaggtgatgcccagaggactcgtgtctgtcagtggagagcatgggaccagcgctcccaagaagttcaggaactgcagccatgacctcagggccagtcctcccacactgcccacagagctgccacagaccagtgtgaggtgcttacccagtggggcccatttgtgccccagggaggagccagaccctcttacctgccccctgccagtgcctgagaactcactggggctgctgtgatcaccatgtgcctaccttgcccagcagtccacgctttgccatatcatggctcagggcctctgggccaaggccacactagatcccacaaagtccacggtggtggtgtccccatctgcaacaggggaaactgaggacccatgaacaggcttgcccaagctgggtatggtggcctgcacctataatcccggctactcaggaggctgaggtgggaggatcgcttgaggccaggagtttgagaccagcctgggcaacttggtgaaaccccatctctttatttcatgtatttatttatttatttttgtttttgagatggaatcttgctgtgtcatccaggctagagtgcagtggtgcgatcttggctcactgcaacctccgcctcccgggttcaagcgattctcctgcctcagcctcccgagtagctgggattacaggcacccaccaccatactcagctgatttttgtatttttagtagagacggggttttgccatgttggccaggctggtctcaaactcctgaccttgggagatccgcccacctcggcctcccaaagtgctgggattacaggcatgagccaccgcacctggccaaaaccccgtctctttaaataaaacaaaataaaacaagaaacccaggcaggcttgcccactgtatgatcctggcagcaggcccaggccacgagcagctgggaccaataactgcttccccttcagaagttctacattccacgagctcccagcactgctaccagctcccccagacagcaggcatctggccacatggggtgtctgctaaaaaagccactcttggctggggtgtggtggtgcacacctgtagtcccagctactcaggaggttgaggcaggagaatcgctcaaacccaggaggcagaggtttcagtgagctgagatcacaccatcattgtacttcagcctgggtgacacagcaagtctcaaaaaaaaaaaaaaaaaaaatcctgccagttcccacccaggtgccgggcactgtagcagaaggaacatcaggcaacgcacctgccctcatggccactcaccttctatacagtcaaacagatgcaggaattagagctctgtataattctagataggttggggagatccattgctggtgaagggtcagggaaggcctttcgaggtgacatttgggctgaagcttgatagaggacatctcaggaacacatccaggccgacagcacagccagtgcacaggcctggggcagccacacgtgatctgtgtggaagcaagaggagcgaagcccggacggctggaatggagtgagcaaggggagggcaggagctgaggtgcaaggaggagcagggccttgttgcttcataacatttaagtccaaggaatatccagaacagttttttgtttttgggtttgtttctaaatctctgctcttaatgtttgggggatatccagtgttgcttatttctcacgactctgcctcagggagtccaggtggtccagaacttgaaccacctgcctaggcctaggcccatctgcctagttcggccaccattgcccaaaaccttgcccaacatccctgggcaaagcttggtgttcagccccccaggcctcggacacccaggagaccaccttgggcctctgtcatgcatggaattacccttccttccaacctgtatcatagtaaagtcttctgctccaaggagtaaacacctggctttcagggcccaagatggagggacgttggttacccttgatgtcatcatgcacctggcctcttcctctcctgctctgttatcctctgtgagcaagcttcagtctccagcttatggcctcatggttgcaacacggctgctgtggcacccagcagcacaccctcaggtggtgtctccattttgcaattgttggctttcctgcagccctgactgaagtgcctggcataagcctggaagcgcaggagctagaagctgccccgatagtactgctatggggaggctgaggttagatgtggagtgcagggggctcacagagggtgacagcaggagaggaagaggccaggtgcacaatgacatgagggtcagaggcccaagttattggtcccagctgctgggtggcctggtccaaccaggagcaaaggcacagagcagggcaccctctagggcagcagaaaagatgcagatctctcccaggggtctccctgggagactcatctggggtcagatgagtcccaggcaacaggaatggagattgctttgatgtgcttggaccatctctcctgtcctgggcatgttgcagctcaaacaaagaggttctctcaataagaaaggcaagtgggctggtaatcagagaggatccagcatgtctgccacttccctcttccaaatgccaggctctgtcctggaaggaccatactttctccatacttcttaaccaggataaaccacctggttaagaagccactgctggtggtgcagcatgtgtgcatgtggtttgtgagctgacagggtcccagcagaaagatgacagcatgcttagatgggatattccaaagagtttaaccaagggatcatttgcaaaggagcagcagggactgggaaaccaccgaggctggtgcagaaccccaggactggcaccctgggagctgttaccacccccaggccacaaggcacaaagagaaggaacaagaacccaaaagagcaaatcccagggagagggtagtgctgagggagctgcagccctgactcccacacaggacggagtgagaatcaacaccctgaccttactcccctcctgcagggcaccccattgtccaaatcctactggaagccagagtgcatagaagcccaggtgaccccgcctccagtcaacctcctaggccatggagcagggcagaacaggactgagagggttcctggggaactgggtccctggaaggaaaacagttcatctttcactgcaactccccccctgcttctacccccacatctacccttggcctccccatagcagtaccatcaggacagctcctgggtcctgagctgccaggcccgtgccaggcatcccagtcagggctgcaggaaagccaacaattgcaaaatggagacaccacctgaaaccccattttgcagatgacccacctgaggcctggatgtttgcccagaggagggattcctcggcaggatgcagtggctcattcctgtaatcccaacactttgggaggccaaggcaggcagacggtttgagctcaggagttcaaaaccagccctaggcaacatagcaagactccacctctacaaaaaattttaaaattagctaggtgtggtggtgcacgcctgtagtcccagctacttgggaggttgatgtgggaggatcacttgagcccaggagcttgaggctacagtgagctgtgttcactccactgcactccagcctaggtgacaaagcaaggccctgtctcaaaaaaaaaaaaaaaaaaaaaccttcctaaccaatccctgcttatatgtctgccacatgccaggccccatgctaagcattctctccatgtgagctacatggatcttcaatacaaactgggaagagggagattccttagtctcattttccaggtgaagaaaccgaggcccaatgagaaatgacttgctctgggtcctgcagagagcaagcggaaatgcatggccagcagaccctcagcactgccacccttgcttccccaaatgaattggcacaactgactctcgggcaatgtaaagaaatgaagaaatactcctctcaccagcaagccttgtacagatgtccccctctgactagaacaccctcccctttcatctgaaacctttcagcgcttatccaggaagccatccctgtacccgtagcctggatcaggagcctgttcgggtccccaggtacccctcttttccccatcatggctgggtctctgcctcacttgcctctcactgtcttggtcattctgggctgtcactggtgtgcctccttcatggacttacgcgatcattttcagtaagctaggtctggagcttagaaaattgtttagttgccaggcgcaatggctcacgcctgtaatcccagcactttgggaggttgaggcaggtggatcactcgaggtcaggagtttgagaccagcctgcccaacatggtgaaaccctatctctactaaaaatacaaaaattagccgggtgtggtggtgcgcacctgtagtcccagctacttgggggactgaggcagcagaatcgcttgaacccaggagacggaggctgcagtgtgtggagatcgtaccactgcactccagcctgggcaacagagtgagaatctgtctcaaaaaacaaaacaaaacaaaacaaaaaaaataaaaacaggttgggcgcggtggctcacgcctgtaatcccagcactttgggaggctgagccgggcggatcacctgcatttaggagtttgagaccagcctggccaacatggtgaaaccccatctctacaaaaaacacaaaaaatcagctgggtgcagtggtgtgcccctgtaatcccagctacttggaaggctgaggcaggagactcacttgaacccaggaggcggaggtcatagaggagccaagatcacgccattgcactccagcctgggcaacgagcaaaactccgcctcaaaaaaaaaaaattaaaaaacagagcttggattgcttcttagtcttctggctaagaatcaagtgtaaaacagcttggccagtgtgccggggtagggtcctgggagcccctggctgtgtcaagagaccccctttgggccaggtgcggtggctcatgcctgtaatcccagcactttgggaggccaaggcaggcggatcacttgacgtcaggagttcaagactagcctggccaacatggtgaaactctgtctctaccaaaaatacaaaaattagcccggtgtggtggtgcatgcctgtagtcccagctactcaggaggctgaggcaggagaatcgtttgaacccgggaggtggaggttccagtgagccaagatggtgccactgcactccagcctgggcaacaagagtgaaactccgtctcaaaaaaagaaaaaaaaataggagacccccttttactttccagactgtgggagggaggaagagtgttgtcccaggcagtaactaggggctagattattaacaaactagtattttagtgcctgctacacctgaacagtgcttctggctgaatgttagccctgggaatctgaagatcagagaggtggggcatcctacctgaggatgcacagcctggatcctcattttgccctgatttatccagatctgctgtcctccctgcaccctacagagcagggcaatcacagcagggggccccttcagtgtcctcagacagctgctgtgatttgaataaccaggcaggctgctggatgtcccctggtgactgatttgcctggcaaacagaccctcaacccctgggagacagtccccctggggccttgtttcttcttcctatcctcaaaagctccccaggcccatctccccttgcctggctctgcttggtggtcctagtgcttgtccacccctggaggctggatggttccctccaaaacctgggagaagatgggcaggtccccaggcaggggtaacctgagccagcttagtccactcccagggccagccaggaaatttgcatgaagagaatgaggttcctcagaggcttcccctcctttcccaccagggatagtcatcctggggctgaggtctgacagcaggtggaagcagcccctgtgtgtggagagccttccggagggcatgccccgcgccttcctggtcaggagtcggcgtccacagccccccaactggggccatctgcctgaccagctccggggagatgcctatatcccaggtgggcccctcactgtgcctggaggtaaggggcaggagagacgcagtgtcaccatctggcttttctcctcagactgcagcagcctgggggggccaccggcacaacagtcgtccagtgtcagggatccgtggacagcggtgagtgtgtaactggctagcaaagccagctgtttcgctcctgcctgctctcagccttaatgaagctgacagccccttgctcccccgacccatctgcacacgccctccagcctcgggacctgtccgcccctacttctctgtgttgggaatgcctctcctttcctagtagtgagctctctactgttaggtctcaccccaggcaccagggccggcagccacagggatctcttccagcggggcacaagattcatccccacatgtggatgatccgctttatgtcagaacatgggacaaggcaacaggagtgcgatgggagataagggctttttcagctgtgcatgcattggaggaaggaaagcgccagccggaatgtaatatattcatgaaagcaaggcactgttctaggcatgggctgttatattcagcgggaataagacaaaaatccacaattttatggagcttatattctggttggggctgcatgtatagacaataaaattagtcagcctgtaattccagcactttgggaggccgaggcgggtgaatcacttgaggtcatgagttcgagaccaggctggccaacatgttgaaaccttgtctctactaaaattacaaacattagccagacatggtggcacgtgcctgtaatcccagctcctcaggaggctgaggcaggagaatcagttgaacctaggaggcagggcagaggatgcagtgagccgagtctgcgccactgcactccagcctgggaaacagatctagactccatcccccctcaaaaaaaacaataaaattagaaaaatagaccgggcatagtggctcatgcctgtaatcccagcactttgtgaggccaaggtgggtggattgcttgaggtcaggaatt

SEQ ID NO: 78 - DNA, 8134 bp, Homo sapiens
  misc_feature (1)..(8134): n = a,c,t, or g
gggattccgggccgggccggcctgggcgcaatcaatgcggctttgtctgggacgcccacatcccagaggccattcccgggtcggcaaatcggagcgcggcggggcgcgcgggggtgagataagcggccatgtgatcccacctgggctggaaggggaggggcgccaggtgaggcggcggccggtggggcgcgggcggccacgcggggctcctgcagcatggctgtcagcaggaaggactggtccgcgctgtccaggtgagcgccggagggagccgggagagatggaggttgccatgttgctcaagctggtctcaaactcctgagctcaggcaatccgcgtgtctcagcctcctaaagtgctaggatcataggcatgagcgaccgcgcctggccgatgtacatagttcttaatgagacctttcactggtcttcaagatcccagtgtgtatttcacacagcatgccttggttcacaccagccacgtttcaagcacttctgagctgctagtagccagtgcaggcctagagggcatttggtctcttctcccagccctagaggagcctgcctcgggagggtcctgggtttccccagctgtgctgaccctctcctcccctcccccagccttgcccggcagaggactctggaggatgaggaggaacaggagcgcgagcgcaggcggcggcaccgcaacctgagctccaccacggacgatgaggctcccaggctcagccagaatggagaccggcaggcctctgcttctgagaggtaggtgctcaggtttctatcctgatggatggggatggactggttgcctcagactaagtgcagcatattcagtctgctcaggggagttggggcccaggaaatgaggctgaagggtgtgatgatgaatttccagttccccaccttccccagactcagtcctgccagcttccatcctcttcataacaatgcttgctactatttgtagaccatccatgagccaatactgtgctggacattttatggccatagctcacgtaatccacacaatgtccctggagagagaggtattgttaacccattttacaggtggagtaacagggttgaaaagtacttaggtgacttgctgagtcacgtacctcaagatggcagggccagaatgtccatccagatctgtcaagctcccgcctccttccattatccaggctgccttcttctaaccctgaacctctataatttacttcgttttttttttttttttttgagacgaagtctcgctgtgtcgctaggctggagtgcagtggcgcgatctcagctcactgcaagctccgcctcctaggttcaagcaattcttctgcctcagcctcctgagtagctgggactacaggcacccaccaccacagccagctaatttttgtatttttagtagaaatggggttttaccatgttggccaggatggtctcgatctgttgacctcatgatccacctgccttggcctcccaaagtgctgggaatacaggcatgagccaccgtgcccagctgccttttttttttttgagatggagtcttgctctgtcaccccagctggagtgcagtggcgcaatcttggctcatgcaacctccgcctcccaggttcaagtattttgcctcagcctcccgagtagctgagattaaaggcacctgccaccatgcccggataatttttgtatttttaggagagatggggtttcaccatgttgggcaggctgatcttgaactcctgacctcaggtgatccaccagcctcaacttcccagtgctgggattacaggtgtgagccgctgcaccggcctataatttacttctgaggagaagaaccttggggctagttttgccatctagattttgggattatgaggtgggggaagagcctggggtttactgaatgccacctacatgccaggactgtcctgggcaccctcatgagtctcattttgcttcctaacaagcccagtttgtagatgtgaaaactgaggctccgacagtaagttaacttgcctgaaagcacatggagagcagggtgatgaggaaggaaaataatctccttttgctggagccaggtgctgtgggttatggacaatcctctcatgttacttttgtttctttgggtcccccagaagggagaacaggctgtgatgaccctctcctctcctgtcctcccctcccccagccttgcccggcagcagactctggaggatgtccagagctgggctgcaccagtacctgtggctgtcacctagtcttggctgcacccacaagactgacaggagtgtggaatggtgcatcggaagacttaggttctgctcccagctcccccacgaatcagctgtgtgaccttgacaaaatccctggacatctctagtcttgatctaagatctaaggggcagagactgtgcttattccttttgatgccccaatgccccaagcaggctctggcacatattaaaacagttattcagagtctgttgactacgtctgaacatggagtcgttggacttcataggaatttataagctttttaaaaagcatagtgtgctttgctcagatgataccttggaagtgcaatatatcgagtggataaaggtggtggtgagccggggatccagggcctgacatcctcacctcctccttggtggccctggcagcatctccattgggttaggtatacttagggtatcttccacctctatcctctgattctgtctcccatcttctgattcagactaccgagcgtggaagaagcagaggtgcccaagccactgcccccagcctccaaagatgaggacgaggacatccagagcatcctcagaacacggcaggagcggaggcagaggcggcaggtggtggaggctgcacaggcccccatccaggagaggctggaggcagaggaggggaggaacagcttgagccctgtgcaggccacacagaaacccctagtctccaagaaggaactggaaatcccacctcgccggagactgagtcgggaacagcggggcccctggcccctggaggaggagagcttggtgggcagggagccagaagagaggaagaaaggggttccagaaaagtccccagtcttggagaagtcctccatgccaaagaagacggcacctgaaaagagcctggtctccgataaaacctccatctctgagaaggtgctggcctcagagaagacatctctatcagagaagatagcagtgtcagagaaaagaaacagctcagagaagaagtctgttctagaaaaaaccagtgtctctgagaagtcgctggccccagggatggcactgggctcaggaaggaggctggtgtctgagaaagcttccatctttgagaaggcactggcctcagagaagagcccaactgcagatgctaagccggccccaaagagggccacagcctcagagcagcccctggcgcaggagccgccagcctctgggggaagcccagccaccaccaaggagcagagaggaagggccctccctgggaagaacctgccctctttggcaaagcagggggcttcagaccctccgactgtggcctcccgcctcccacccgtcacactccaggttggcagtgtcccgtccctcccacccttctactctgccacctggctggaactgccggccagtcccacccaggtagtccctggttccctgggtgcctccatcctcctacctgcaggctggccttggaagtctcttctttccctgcctgcttctagccatggtcagagcagggaggctgagatggggcaggctgctggagcttaaagggggcccagctgtggggcagggagcatctggtgccccccaccatatcctcatccagggcctgggctccaggaccccggcagactagtggggagcctcagatccttctagaagctcccctggaaagctctgcctggtgccctggccccaagggactttgtctgtgagccactcccacagcagatgaaggaggcaggagagaaggcacagggctgtctcattctcccctcttcctgcagctcctggggtgagccatggggtttatggctgccccggcttgatgggccctagacctcttatgtgacactccccctgctccatccaggtgaaaatccccagcaaggaggaagaggcagatatgtcctcacccacacagcgaacctacagcagctccctcaaacgctccagccccaggaccatctcctttcgggtgagagccctgggcaccctggtctgcgagccactggagggcaagtggaggaagcccgcatccattacaacataggagccgtaggttaggtaggaaggtcccctggatagagaggagcttttgattcccatgggtggccctgaacaaacaaggttgtattcagcagaggagaacaggttagtaacctggggggtaggtgccagtaagcatgagcagccccacctagtgggcaaggcagggtgtatgaagaccggacaggcagggctggccctggtttgcagggaggtccacacctgcttcatcagttcctggctcacctaggagattgtctaggaggggaggggaggaacagagagcagcaaggctctcctactgctccctgccctgccactctcccaatagtacaaactatgtggattggggaaatctcgtcttgctttgtcctggtgtttattcttggttcttctgttcactgggtcattcactcaatcattgggtatcatgcctctaatgtgtgccaggccctggagaggtggcccaatagcgactggtgcccccacagagctcatgggtagtgggaggcagataggaaacaggtggttacaggtgccctgcgaaggaagtctgaagaaagtcttctgacccatattagtgggtgggaacctgtgtcttccagatacaaacaaggatctttaacgaaggcttgtccacatatttctttggtggggttgacccctggtagaaggggtgggaggtctgaagaggaggaggacatgtcttgagagctgggctcctcactcgagggggccaccgatttcccggggactcccacacaacaatgcctttccttctcatttcagatgaaacccaagaaagaaaactcggaaacaaccctaactcgcaggtggggggcctggaggctctggttctttctatttggccatgtccaggctattttctgagtacctgcacccgccctcctgtgccaggctgtggggtagggcacatgaggggaaggtgcagtccttgcccagggctccagatctggcagggggatgggattaacaggatgaactcaggcgggataagatggaacaaggatggggaaggatcagggagagctgctcagaggaggcagggcttgggtggggctccaaagggggatgagggtttagccttgaggttaggacagggcaaagggggctttctgggagggagaccacgaacagtgtnagggaggggaagcccctgctccagcaggcctggttggggggctatgccagactgtgggggagggaaggggaggcccagatcactagagccttgtatgctgtgccaaggcctatggggtctgagctggaaggacaggatcagatttgaggtaggagcagccatgtggagagctcacggtggcaggctgggagagcaggtaagtggcgattgctgtgatggggaagacggaaaggaaggacctgctttgggaggtgttttgcagtggaaatgacaaggtatgggggagaagggatgtcctattgaatgggacgttncttggaagnggagggaaatccctggcgtctgtaagttcctcatgttggccaagtcaacacagcctgcngtgtgatggagggccacattctcttggccacaangagaacgtgtgatggggctgctcctcaggccctgggggcaggcctggtctgccctgggtgtctcacttggctcgcctgttccatcttccatcctgcagtgccagcatgaagctcccagacaacacagtgaagttgggagagaagctggagagataccacacggccatacgggtgggtgggggcttctcctgaggggcggagggtgcaggatgagtagtgggcatggccctttcccctccccagcatgggtcagctgttggtgttcttggttcccagagatcagaatctgtcaagtctcggggtctgccttgcactgagttattcgtggctcctgtgggtgtagccagcaagcgccacctctttgagaaggaactggcgggccagagccgagcagaaccagcctccagccggaaggtgaggggctcaggccccacagggtccttagggtgattagccctgacgtctccaaaacccaaatcttggctgtggcaatgctagaaaactgtcctcatgtgtcaattaatgttggcagaactccatttgagttcccattcacgttcctgagcccatctccttagctgggcacacagctccctgggggaaggggagggggctgtcccaggtatatgtggcatgtgctggatgcataggggagtgagggagagtcctatcccattccagggcctctgaacatgcctcgctgctgcaagggcctaaaccctgagatggaaagttctctttttaggagaacttgaggctctcaggggttgtgacatcaaggctcaacctgtggatcagcaggacccaggaatctggagatcaggacccccaggtatcctcaccctccctgatgtctcttactgtggagcctttgtggtgggatgactggggacagaggagggacagtcggtagaggaggagtcatttcgggagaggaggagtcatttcgggagaggaggagtcatttcaggagtggaggcagtcgggaatagatgggtgtgtgggtcagactctggcagagaggaggggtggtctggttccttttctctttcgggaagagaaaggacatcctgggctgggagctgggcctggggtatcccgagccctttggagcctggtcttagactctggcctccaccctgataccctcaatcaggaggcacagaaagcatcatctgcaaccgagaggactcagtggggacagaaatctgactcctcgctggacgctgaggtgaatggtggggaggagcctggccctacgggggaggccccggtgtactgtgggagaccccatcgtcgccgtgtgcacacactaattggcctgcaatcgcgcagtccacccagaacgcccccatgccctgctcatgcagattggtctgagccaaccgtgagaacaaggttgagccctcacctggttgtgctgcctgcagctctgcagagcccctccctcttcagctggcagattacagggctctgactccttgtgggtgtggggcttgggcaaagggatgccttcctatccagtggcccccttccccttccatgccctgacaccccattgacttgtgctaacagctcttttccccacaggtgtgacaagccccgccaagacagacctgcaagtcttcgtctcaagggacctccctcatgccaggcccctgcctctcacagcagcaccctttcctctcattgtccctgttcccttgttggctgtggatctgtttggccagggtccctggggtcaggaatatttgcaagactcagccagctccttcccagcccagcctcttggggctgggactttctcaccctgcggcaggcacaacagatgctgggacccagtctctgcccaggtcacagcacaagtgcacatcagcactatggggcctatgtcctgcccagagacctctgctccttcctgctcacatccacagtcagggcacggcgcccctcaagaactccagagtcacctgtctcatcggctcccaacaagtgcctctttgtctatgatgtcccccttctctgaggcctggacccacccatctttgtccctgggggctgctcccagccactgaggcccgctctggccaggggagaaggagctgccgtgcgtcttccctgtgccccgtctccctgcttggttctcccctcccttccctggccggctgccatggccaggagctaagtgcctttttgtgtgcaaccacttaccctttctctgaaaaacctgttctcaggaaggatctgataaactcatttactctc

SEQ ID NO: 79 - DNA, 6165 bp, Homo sapiens
  misc_feature (1)..(6165): n = a,c,t, or g
tctagaagattgactcatgcaaaatgcacatcaagttattgtgaggtcctgaaatgatatctggggcttgggcagaggatcgttatagagtttgccctaccactcaaatgctttgggaggtatgcttcctttacacctctcaaatgtgcttctggtcttctggcttaggaagtcaaaatttaaacctagtcctctatggaaaaatgggctcctgtaacatcctgcagaattattaaaataaaacaaggacctagatggataactttcatttgcactcactcagctccaaatcagcatgatccccaaagtctcttgcagctcagaaattccatgaagctagcttacttttcctaacaagaaaatccccttctagaaatgcccatccgctatttgtaaactttcttagtaaactgataaatagatcatttgcccttaaaacaaacttttaatttcaactctgaaagacatgcatatatgtccttcagaatcttaccttttaaaatggaaactgcttggaagtggcttttacctggggaatatgacatgcatgtgtctgttatactgccttcctgccaaaataagtgtgtctttaggcacgctctttgcatattctattgctaactacattttgccagacactgcttgtgaatgcagtatgtgtgagaccactgcccagcttcctgtagtgctagtcctacatttccacacagaactcctcacctagccaaattcttgagcgctttgcagtcagcagcactacctgaggctctgcctgagtgtcactttagttgtcttgcagaaagcttcagatgtccttggttctatttaggttgtgcaaatagacatatgaggtttggttctggttagtggttgctagtaccagatcaccttgcttactggtgagttcattcaaacccaaaaagtcacacctgtgtcctgtgcgcgggtgctgcaggcttaggtggagaaaagcagggctagaattggaacccaaagcccagaatggcaggagaggatgtgggggctccacccgatcacctctgggttcaccaagagggtatctaccgcgacgaataccagcgcacgtgggtggccgtcgtggaagaggtaactgtttacattttgcttatttctttgattttgctttcaagtaacttggtttctattccagtctcaatattctgaagtctttggttttatttttgatcattcctttccattaggagacgagtttcctaagggcacgagtccagcaaattcaggttcccttaggtgacgcagctaggccaagtcaccttcttacctcccagctacctctcatgtggcaactctacccggaggagcgctacatggataacaactctcgcttgtggcagatacagcatcatttaatggtacacatgttgcttaattattttccattgtactgggactctcgtaacagagtactccataaacttttctttttctgacaggtcaggggagtacaggagctgttgcttaagcttttgcctgatgactaacctggtatgtatttctatttctcctctgtcctccccctctttgttttggctctattcagttgtggtgattttaatgatttttttttccaggtgctgggattctacgaagatatgctcctttgttctgttcagtatttggcaatcacttcatccactactgcagtgcacccacccttgggcctggggggagggagtgggttgaaaaactgctcaagaaacagaagtttagcaagggtcatgaagaatactgcaagtgaaactgcagagagaggttacgtaggcagaaagcaagtcaacaaaagcacttagtcaggatccgtaacttgaaattgactcctttggaaattgccatagaacccttaatggacatcatcggctggacctgggatctgatgaatcccacaaaagtcagcaccttctacagaacagatgccctgatcaccaaggacttggtactgatttagagagaagagagcagctcctagcagcatcaacatctatttgtcgcttatttgccctgcagcaattcacctgcctttccttctcccatcctgtaaatatcctaggttttgctccagtgtttcccatcccagtactgacctaatttggatctgctgagtatttagagggctctgaaaagagatatgcattgatgaaattagctacaaaggcttgtgggcctttttttctatctgaaatcgtgtcttcaaattactggaagttgctgatcaaaattgtgggctcttgaattcaatcaactcttttgaatactgtaaaccaacgttaggctagaggagccgacgggcagtggctctatcattcgcagaagaaacccttgataaatgattaaactccttgagctttttttattacgcatatataaatgggaatcatacctacctcaaagcattnnnnnnnnnnaaaaccttacttttaatgtatataaactgttataactactttaactcaggaaattctttacaagatgtaaatgttttcctaggaatcagcaatatttggtgttattacttcctgagaaaggtgccagttaagcagctaaaatggtttttcttgaagttctatagaaaccacgttatttaaaatatctgtaatcagagaatgaattcaaggttttttttccatgtaaagctatttatatcttccaagcctaatgaaatggatattataaaaatacagttgattcatcctatgtttgggaagagtatttttagtgtaattattttccagcaattgtaagggcatatagtgcttgtctcagaagaaaattccacgtagaggggctttaaagtctttatggaaaaaagaaaaataaaaatcatttttcttgttttagttttctggatatgccgcagaaggatccgtgccagaagcaagcctgtgagatacagaaatgtttacaaggtagtatattgtaaaatgctttaaaaatatttttccactgtgaactaactataagagaccaattattcttttatctgtattaactcttttttaagaatgtaacgtatatgtaattatcctgaagattctcttcattgtatcaaagatgcagaaaataaaaagtaatgtgatcaaagctaaaaatttcactccaggtgattagcatcacctggagatctttaaacacttacctagaacaattcagacttcctagggctagggctagaaaaaaagggttttttgttgttgttgtttgtttttactaaaaggctagttttaaattggttatacttcactgcagctgacataacactttttaaaagcaatctggaagaggtgcggttgaaataacaattggaattnnnnnnnnnnnnnnnnnnnnnnnnnnnnnnnnnnnnnnnnnnnnnnnnnnnnnnnnnnnnnnnnnnnnnnnnnnnnnnnnnnnnnnnnnnnnnnnnnnnnnnnnnnnnnnnnnnnnnnnnnnnnnnnnnnnnnnnnnnnnnnnnnnnnnnnnnnnnnnnnnnnnnnnnnnnnnnnnnnnnnnnnnnnnnnnnnnnnnnnnnnnnnnnnnnnnnnnnnnnnnnnnnnnnnnnnnnnnnnnnnnnnnnnnnnnnnnnnnnnnnnnnnnnnnnnnnnnnnnnnnnnnnnnnnnnnnnnnnnnnnnnnnnnnnnnnnnnnnnnnnnnnnnnnnnnnnnnnnnnnnnnnnnnnnnnnnnnnnnnnnnnnnnnnnnnnnnnnnnnnnnnnnnnnnnnnnnnnnnnnnnnnnnnnnnnnnnnnnnnnnnnnnnnnnnnnnnnnnnnnnnnnnnnnnnnnnnnnnnnnnnnnnnnnnnnnnnnnnnnnnnnnnnnnnnnnnnnnnnnnnnnnnnnnnnnnnnnnnnnnnnnnnnnnnnnnnnnnnnnnnnnnnnnnnnnnnnnnnnnnnnnnnnnnnnnnnnnnnnnnnnnnnnnnnnnnnnnnnnnnnnnnnnnnnnnnnnnnnnnnnnnnnnnnnnnnnnnnnnnnnnnnnnnnnnnnnnnnnnnnnnnnnnnnnnnnnnnnnnnnnnnnnnnnnnnnnnnnnnnnnnnnnnnnnnnnnnnnnnnnnnnnnnnnnnnnnnnnnnnnnnnnnnnnnnnnnnnnnnnnnnnnnnnnnnnnnnnnnnnnnnnnnnnnnnnnnnnnnnnnnnnnnnnnnnnnnnnnnnnnnnnnnnnnnnnnnnnnnnnnnnnnnnnnnnnnnnnnnnnnnnnnnnnnnnnnnnnnnnnnnnnnnnnnnnnnnnnnnnnnnnnnnnnnnnnnnnnnnnnnnnnnnnnnnnnnnnnnnnnnnnnnnnnnnnnnnnnnnnnnnnnnnnnnnnnnnnnnnnnnnnnnnnnnnnnnnnnnnnnnnnnnnnnnnnnnnnnnnnnnnnnnnnnnnnnnnnnnnnnnnnnnnnnnnnnnnnnnnnnnnnnnnnnnnnnnnnnnnnnnnnnnnnnnnnnnnnnnnnnnnnnnnnnnnnnnnnnnnnnnnnnnnnnnnnnnnnnnnnnnnnnnnnnnnnnnnnnnnnnnnnnnnnnnnnnnnnnnnnnnnnnnnnnnnnnnnnnnnnnnnnnnnnnnnnnnnnnnnnnnnnnnnnnnnnnnnnnnnnnnnnnnnnnnnnnnnnnnnnnnnnnnnnnnnnnnnnnnnnnnnnnnnnnnnnnnnnnnnnnnnnnnnnnnnnnnnnnnnnnnnnnnnnnnnnnnnnnnnnnnnnnnnnnnnnnnnnnnnnnnnnnnnnnnnnnnnnnnnnnnnnnnnnnnnnnnnnnnnnnnnnnnnnnnnnnnnnnnnnnnnnnnnnnnnnnnnnnnnnnnnnnnnnnnnnnnnnnnnnnnnnnnnnnnnnnnnnnnnnnnnnnnnnnnnnnnnnnnnnnnnnnnnnnnnnnnnnnnnnnnnnnnnnnnnnnnnnnnnnnnnnnnnnnnnnnnnnnnnnnnnnnnnnnnnnnnnnnnnnnnnnnnnnnnnnnnnnnnnnnnnnnnnnnnnnnnnnnnnnnnnnnnnnnnnnnnnnnnnnnnnnnnnnnnnnnnnnnnnnnnnnnnnnnnnnnnnnnnnnnnnnnnnnnnnnnnnnnnnnnnnnnnnnnnnnnnnnnnnnnnnnnnnnnnnnnnnnnnnnnnnnnnnnnnnnnnnnnnnnnnnnnnnnnnnnnnnnnnnnnnnnnnnnnnnnnnnnnnnnnnnnnnnnnnnnnnnnnnnnnnnnnnnnnnnnnnnnnnnnnnnnnnnnnnnnnnnnnnnnnnnnnnnnnnnnnnnnnnnnnnnnnnnnnnnnnnnnnnnnnnnnnnnnnnnnnnnnnnnnnnnnnnnnnnnnnnnnnnnnnnnnnnnnnnnnnnnnnnnnnnnnnnnnnnnnnnnnnnnnnnnnnnnnnnnnnnnnnnnnnnnnnnnnnnnnnnaaaattatatattaaaatagctttcttccactttgcaaatcatactttcccctaacgaacctgtcgacaggtctctaaattagaaagaattcagtggactttggtatatcttctttcttccagttccataggtactgaaagtgaaaaggggtgggaagcactgatctaaacctccctgtaccttagtcctatgagatcatgactagagtctgcctgtatgtttttcagccaacagctacatggaatcaaagtgtcaggctgtcatccaagaactgcgtaagtgttgtgctcagtatcccaagggaagatctgtcgtctgttcaggatttgaaaaagaagaggaagaaaacctaacacggaagtctgcatcaaagtaaagttcttctgaagtgctgctccatgtttccaccaaatgaattttttttatcctcctgactcttcaggccaggtagcagcaaatagcaaatgaaaaagtcagctacaaaagttaatgaatatgccatctatgcagaacaggcagaaatataaacacattaaaagacaaatatgtagaatgtaatatactgagctgctaaaataaacctgtttaagagaaaaatttgggttttgtactaaatgtattttaagactattagatatagggtattaatgaattctcttgaagttcaagccactagtgccattcatcaaatttaagtcatatgaggtatgttaggtgaaaggactcacttccagcatcacaattttgacgcctttttttttttttttttttttttttgagatggagtctcactctgtcatccaggc

SEQ ID NO: 80 - DNA, 53522 bp, Homo sapiens
tgtaaactttttgagacagcatctcaccctgttccccaggctggagtgcagtggtgtgatcatggctcactgcagcgtcaacctcctgggtctacttgatctgtaaacttcgagggaaggtgtaataaaccctcctgcaatgtctttgtttttcaaaatctttgtatttcacagtttagcttcgtgggttgatgttctattttgtttttgtgtgtgtgtgtgtgtgttttgtgtttttttttgagacacagtcttgctcttgttgcccaggctggagtgcaatggtgtgatcttggctcactgcaacttccacctcttgggttcaagagattctcctgcctcagccttccgagtagctaggattacaggcgccgccaccacaccccgctaattttgtatttttagtagagatggggtttctccatattggtcaggctggtctcaaactcccgacctcaggtgatccgcccacctcagcctcccaaaatgctgggattacaggcgtgagtcaccgcacctggccaatgttctatttttgagaacacaacagttcataatatattctacatagaccatacctgttatgtgtagataaacagactcttttcccatttaacaccttttgccttaggtttatttttctggtatcaatactggcacacttactttgtttgcagtttcctgtcttttttttttttttttttttttttgagacagagtctcactctgtcacccaggctggagtgaagtggcgggatctcggctcactgcaacctctacctcctgggttcatgcgattctcctgcctcagcttcccgaatagctgagaccacaactgtgtgccaccatgcccagccaatttttgtatttttagtagacacggggtttcaccatactggccaggatggctcaatctcttgacctcgtgatccacctgcctccgcctcccaaagtgctgggattacaggcatgagccactgtgcctggcctttttttttctttttgagatggagtctcactctgtcacccaggctggagtgcagtggggtaacctcaggtcactgcgacctccgcctcccgggttccagtgattctcctgcctcagcctcccgagtagctgggattacaggcacccaccaccatgcctggctaatttttgtatttttagtagagacggggttttgccacgttggccaggttggtctcgaactcttggcctcatgtgacccgcctgccttggcctcccaaagtgctgggattacaggtgtgagccactgtgcctggcctggctttcttgtttcttttctcctcttctagtttcccccttttaggctaacaattattcactgttaataaaaaccctcaggtctgtattttatcaagaaacatttccctcacgtcttcttccctgaaccaaacaagatctctggcacattttatttgctctgtctcaccacatggattttgtttttttgtttctttgttttttgagatggagtctcactcttgttgcccaggctggagtgccatggcacaatctcagctcactgcaacctccacctcctgggttcaagcgattctcctgtctcagcctcctgagtagctgggattacaggcgcgtggcaccacccccagctaatttttgtatttttagtagagacggggtttcaccatgttggtcaggctggtctcgaactcctgaccttgtgatctgcccaccttggcctcccaaagtgctgggattacaggcatgagccaccacgcccggcccccatggtttttcaaatagtttagaatttcatttccaggtaactaatttgcttctttaaacatatgtcttttctatttaagaaatcctttctaaacaattgcattttattccacaaccgccttcaaacaatcattgagacttggttaatctgttttgctcatttggcagcagtttcttgtggctgtttcttccctccactggagtccttgaatcttaagtctgtcatttgactgcaattaaaagctgggtttggaatacaatcgcagccttaccatccacctgctgtgtgacctggtaaatttctttttttttttttgagacggagtcttgctctgttgcccaggctggagtgcagtggcacaacctctgcctcccaggttcaagcgattctactgcctcaggctccctagtagctgggattataggtgcctgccaccatgcccagctgatttttgtatttttagtagagatgaggtttcaccatgttggctaggctggtctcgaacttctgatcttgtgatctgcccgcctcggcctcccaaagtgctgggattacaggcatgagccaccactcccagccagttctttttttcttttttccatttttttttttttcgagacaggatcttactcttttgcccaggcgggagtgcagtggcacaatcacggctcagcgcagccactgcctactgggctcacacgctcctccggcctcagcctctcgagtacctgggactacaagcgtgagccagtttggctaattttggctaatttttgtagaaacggggtctcgccatgttggccaggctggtctccaactcctggactcaagggatccaccttcctccccctctcaaagttctgggattaccggagtgagccactgtgccctgctggcaaatttcttaaactgtctgtgcctcagtgacctcatttaataaagggaataattgtagcacactttttctagagctgtgaagattcaatggaataaataaggcaataaatgaatggatggggaatgaaggatgtgggtttcctccctcttgtctttcaataagctctcaccatcaacctcccattgcctgttctctctcttccccctctctccctctgtctctctctcagccaggaaacctggggtagggaggcttggagccagcgggtgcgtcgggaggctgcgggtactgactcgggccgcgcacggagatcgcgggagaaggatccacaaccgcggaagaaggatcagggtggagcctgtggctgctgcaggaggaggaacccgccgcctggcccacaccacaggagaagggcggagcagatggcaccctgcccaccgcttcccgcccacgcactttagcctgcagcggggcggagcgtgaaaaatagctcgtgctcctcggccgactctgcagtgcgacggcggtgcttccagacgctccgccccacgtcgcatgcgccccgggaacgcgtggggcggagcttccggaggccccgccctgctgccgaccctgtggagcggagggtgaagcctccggatgccagtccctcatcgctggcccggtcgcgctgtggcgaagggggcggagcctgcacccgccccgccccccctcgccccgtccgccccgcgccgcgcggggaggaggaggaggagccgcggcggggcccgcactgcagcgccagcgtccgagcgggcggccgagctcccggagcggcctggccccgagccccgagcgggcgtcgctcagcagcaggtcgcggccgcagccccatccagcccgcgcccgccatgccgtccgcgggccccgcctgagctgcggcctccgcgcgcgggcgggcctggggacggcggggccatgcgcgcgctgccctaacgatgccgcccgccgcgcccgcccgcctggcgctggccctgggcctgggcctgtggctcggggcgctggcggggggccccgggcgcggctgcgggccctgcgagcccccctgcctctgcggcccagcgcccggcgccgcctgccgcgtcaactgctcgggccgcgggctgcggacgctcggtcccgcgctgcgcatccccgcggacgccacagcgctgtgagtagcgggcccagcggcacccgggagaggccgcgggacgggcgggcgtgggcgggttccctggcccgggacgggaagcaggacgcgggccaggacgctcccaggggcgaggctccggcgcggcacggcgggccctgctaaataaggaacgcctggagccgcggttggcacggccccggggagccgaaaaaccccgggtctggagacagacgtcccacccgggggctctgcagacgccagcgggggcggggcgcggaggccgcgctcagctgggaggacaaacagtcgctaattggagaggaattgggatgcggcctggggctgcggggtacccggagaggtggggatggctgtagggggcggcagggaagagttccaggaggtgtctggaaaaggatttgatggatgtgcaagaattgggctgatgcttaggaaggggcgatgaggtgggtccagaagaaggggggtgaacggtgtgagcaaagaccgtgaggctggaggctggccacgggaggtgtgaggggtaggggcagggtgggaggtgggctcgcgggtgggctggggtcatgaagggcctcaggcgctctgctattgggttccaaggctatcctgagaacaggggtgaggggggattgccgtggggggttaaagccttgtcatgttcgctttcgggagataaaaacaacaggtggcctttatggagacgctgcccagagccaggtctgtgccaggctcctgttgggggtcgtcatgcggaatcctgactctgaccatccgaggcatagggaccgtggagatttgcatttcacagatgaggaaacaggtttggagaggtgacacgacctgtcccaggcatcacagccgggatgtgcatagcaggggtttggaactatgaggtgcccaggacccagggttggattgaaaagggcggaggggactaagataagcagacagttgtccccagcgctggggagagtcttgggaccagtctgatgccttgtatttcccaggctccaggctcctcgccgggacagtgtctccttgggtgcgtgctggatccctgggggacgtggcacatccccaggcttgctaaacattgggtgggttctggcatttggttttgtaacgtttctgggtcactcccgcctgtggccacccttccttaggggagccgtgtgtccttggggctttgctgggtggtctcgagggtgggagaagaatgggttctcctggaccaatggagcccgtgcccctcggggccacattgctcctgcgctccctgactgcggacgcgtgtgtctcgcggctgtctctgtggagatggcctcctcctgcctggcaacagcacccacagaattgcatcagacctaccccacccgttgtttgtgatgctgtagctgagggctcctctgtctgccaggccggtcactggggactctgtccagggcctggtggttcctgcttcccagcacctgatggtgtccatgagagcagcccctcaggagctgtccgggagagaagggcgctggtggctgctgagcggagagcaaggcccgtgttctccaggcccttggcacagcagtggagcccccgcccctgccttgtgttgtcctcttaggctctggtcctggggtttggaggagggggaccctgggagttggtggcctgtcccagcctgagctggcaagattccgaatgccaggccccccaagtgtgcaacagggcacagggtgacctcatgtgggcaggtgggtgctgttctgtacacacctggggccgccgctgggagagttctggaaggtggggtgaggggacccatggcaaactagggccttaggaaggatgtgaaggccctggctggccccccaggccaccctctgtgctgtggggcagcccagccattttgctgtctaccctgcaaactcctcctcggggagacggctgggttttccccagggaagaggggtcaagctgggagaggtgaaggacacagatcacagctgctggcaggtgttcaagggtccaagagcgttgctgtctgggtgtcaccagtagccttcctggggggctcacgcaggtgcctctccacttgtggctccctggctgctgaagctcagcagggacagctgtgtccagttccaggtggaggacagccggggcttctgaggccacagcctgccttgggttaatgatgctgccgagaggtggtggcttttggaaaagatggcgtactgcaaaacgtgctgctctgcgtggctcgaagcttcgtggggagacgtgggcagagccgtggctgactcacagaccccccaccccagagcctgccctgccctccctgccccgacccttctccctcctgacccatgtgttttttttttttttttttttttttgagacagagttcactcttgttgccaaggctggagtgcaatggcacgatctcggctcatggcaacctccgcctcctgggttcaagcgctttttcctgcctcagcctcccgagtagctgggattacaggcgtgcaccaccatgcctggctaattttgtatttttagtagagacagggtttctccatattggtcaggctggtcttgaactcctgacctcagatgatccgcccgcctcggcctcccaaagtgctgggattacaggcatgagccaccacgcccagccctgacccatgttttgaaccaaattccagccacccttttatctgcaagcattttggagggcatcgcaatactgcagacccacctaacacaacagacagttccttcatgccaccgaaggcctggtgtgttcacatttttggtttaatagtttgaattaagagccaaataaggtccacacactgcaattagttgatgtctttttttttttctttttttttttttttttgagacggagtcttgctcttgtctccaggccgcagtgcagtggcatgatctcagctcaccgcaacctccgactccctggttcaagcgattctcctgcctcagcctcccgagtacctggtagctgggtttacaggcatgcaccaccgtgcccagctaatttttgtatttttagtagagacggggttttactgtgttggccaggatggtctcgatctcctgacctcgtgatctgcccacctcggcctcccaaagtgctgggattacaggcgtgagccaccgcacccggccaatgtcttttaaaaatatatactttttttttttttttgagacggagtttcgctcttgttgcccaggctggagtgcagtggcgcgatctcacctcacggcaacctccgcctcccgggttcaagtgattctcctgcctcagcctctccagtagctgggattacaggcatgtgccaccatgcctggctaattttgtatttttaggagagacggggtttctccacgttggtcaggctggtctcaaactcctgacctcaggtgatccgcctgccttggcctcccaaagtgttgggattacaggtgtgagccaacgcgcccagacaaaaatatatgtgtgtctttaaggctggtcaagcaaagcagtaggactggagaaagaatgaagaattctacctggctgtgatcaattcgttgtgaacaccactgtgcttggaccagctagctgatgtcttttgttttgttttgtttgagacggagtctggctctgtcacccaggctggaggacaatggtgtgatctcggctcactgcagcctccatctcccgggttcaagcgattctcctgcctcagcctcctgagtagctgggattagaggcgcgcgccaccacgcccggctaatttttaaaaatatttttagtagagatggggtttcaccatgttggtcaggctggtcttgaactcttggccttaggtgatctgcttgcctcggcctcccaaagtgctgggattacaggtgtgagtgatgtattttatttatttatttatttatttatttttattatttgagatggagtctcactctgttgcccaggctggagtgcagcagtgccatctcagctcactgcaagctccgcctcctgggttcacgccattctcctgcctcagcctcctgagtagcctggactggtgcccgccaccatgcccagctaattttttgtatttttagtagagacggggtttcaccgtgttagccaggatggtctggatctcctgacctcgtgatcctcccgcctcagcctcccaaagtgctgggattacaggcttgagccaccgcctgtcttttaaatgtccgatgatgtctaggagcttcccttcctctctttttccttgtgcaatttgttgaagaaactggctcctgcagcctggatttctcgctgtgtcttgggggtgccacctccatggtgtcacctccgtggtgctgtgagtgtgtgctttgtgtttcttgtaaattggtcgttggagccgacatcccattgtcccagaggttgtcctggctggcactggcctaggtgtagatgtcatcagctcagggccccctgctctaaaggccacttctggtgctggttgccactcaccctggctgggggtcacctgggtctgctgctgtctcgcaaatgctggggtccaggactgggcacatcgagggacttggtaggtgcttggttcactgatgtaaaatataggagcacccggggccttgccctttcccacctgcatccctgaatgacaggagagtgtgggagagtgtagggacagcaggcgcagaccccggggcccctgcctgggattggcgtcggggaagacaggcattctggagcgacccctaggcctgatgccttagagcgcaactgccagagacacagcttccttggggggctggccaggccacggaggggccctggctcccatttctggtccctggatcctgagagcgaggactagggattgtcaccaaggcctccatgagccctcagcagaaggagggccaccctcgagggctccgttatcactggagcccgcgttcaaccaacacgcagatgattctccaaggacagagatggatgatggggagggggctggcctggaaggacccccagtgcaggtgacattgaagccaggtttcaaagctcccacagggagctgcccagagagagtccccaaggggcaaggtgactcgggggcaggggtagggcctctgtcaggagagcctaggagaggcctgtgtcttctaggaagagccctggcagccgagcggaggcagtggtgaggacctgcatcctgcatgtccagctggcctcacccggggtccctgagccgggtcttacgtggctcccgcactcgggcgttcagaacgtgcctgcgtgagaaacggtagtttctttattagacgcggatgcaaactcgccaaacttgtggacaaaaatgtggacaagaagtcacacgctcactcctgtacgcgattgccggcaggggtgggggaagggatggggaggctttggttgtgtctgcagcagttgggaatgtggggcacccgagctcccactgcagaggcgactgtggagacagagagcacctgcaggtcatccatgcagtatcggcttgcatccagatcatacagggaacactatgattcaacaacagacagggaccccgtttaaacatggacaaggggtcactcacgcctggaatcccagcagtttgggaggccagggtgggtggatcgcttgagcccaggagtttgacaccagcctgggcaacagggtgagaccccggtctctaaaaaataaaagaacattggccgggcgtggtggtatgcatctgtggtcccagctattcaggagactgaggtgggacatcacttgagccgaggaggtcaaggctgcagtgagctgtgatcacaccactgcactccaggctgggtcacagagcaagaccctgtctcaaaaaaaaaaaaaaaaaaaaaaaaaaatcacaggatctgaacagagatttctccaaagaagacgcacagatggccaacagcgtgtgagaagatggtcggcctcattagtcatgagggaaacgtaaatcaaaaccactgtccagccgggcgcggtgcctcacgcctgtaatcccagcactttaggagagcagatggcttgaggccaggagtttgaggccagcctgggcaacatagcgagaccaataaatagatattagtggtggcgcctgtagtcccagctagttgggaggctgaggggggaggattccctgagtctatgaggttgagactgcagttagctgtgatggtgccactgcactccagcctgggcgactaggaaacggtctttaaaaaaaaaaaaaaaaaacagggtgggcgcggtggttcacgcctgtaatctcagcactttgggaggccaaggtggggggatcacaaggtcaggagtttgtgaccagcctgaccaacatggtgaaaccccgttctactaaaaatacaaaaattagcgaggtgtggtcgtgggcgcctgtaatcccagctaattaggaggctgaggcaggagaatcacttgaacccgggaggcggaggttgcagtgagccaatatcacaccactgcactctagcctggtcaacagagcgagactctgtctcaaaaaaaaaaaatgctgagcgtggtggcgcatgcctgtagtctcagctactttgggggctgaggcaggagaatcgcttgaacctgggaggcagaggtcgcagtgaggcaagattgcaccattgcactccagcctgggagacagagtgaaactctgtctcaaaaagaaaaggtctaggaagagtccgcaccctctccccgcggtggccacgccgggctccgcgctgagccctctgtgttcttgtctctccatacctcatcacggcaccgcagggttgcagccactcctggtctcattttacacaccaggaaattgaggctctttgagaagccgtggtgatgatttcatcagcatgctctggggcagacccctgcagccgcacagggtgcctggggcccacactagtgccctggtttatagacagacagaggtggcagtggcgcttccgagtcgggctgcgatgtgcttgcactccccgaggggctgaggggccctgcgcccaggtgcagctgcttgggtgctgccagcccctcccacctctccctccctgccagcccctcccacctctccctccctgccagcccctcccacctctccctccctgccagcccctcccacctctccctccctgccagcccctcccacctctccctccctgccagcccctcccacctctccctccctgccagcccctcccacctctccctccctgccagcccctcccacctctccctccctccagcccctcccacctctccctccctgccagcccctcccacctctccctccctgccagcccctcccacctctccctccctgccagcccctcccacctctccctccctgccagcccctcccacctctccctccctgccagcccctcccacctctccctccctgccagcccctcccacctctccctccctggctcatccctgctgtgtcccttctctctagtttcctgttcagtttcaggaaggaggctgggaacccagatgtagggaatttgcgccctggagtcagacctgggttcacgtcccagcgcctccacctctggtgtgaccttggtccagtctctcagcctcagtttcctcacctgtaaagtgggctccatgattagatgcaccctgcagggcagtgtagcagtgacctggctcagccactggcagccccaacaatcataccttgttaaagtagctctgtcggttccctcaggggttccgggggcccattcccctgtcctccatgcactgtgagacctgccctgccacagagcagagtgtaacagcctgagggtgagagccagacactgtgcctgtgcttagaccagacactggacgacgggagccagtgcagcctgggcgggtggactcctatggacccctcagcacccagcctcggtgccttcagcgcagggccgcgtggctgtgggggctcacaagacccggcccactcctgcttgtgcctacatctgggtgtttgcccattggtgccttttgacgcgttctggtgtgtgtgagacgtgcggggctgggaagtgttggcagagccgcgagtaccgtcctcactccttttgttcttttgacgtaagctggcgagtggcactgcctgagttccgctcagtgcccgccctgatgtgcggaccccgctgcattcttgctgttaggtggtggcggtgtgcgctgtcgctggtgggcaccgagagtctttgggagctttggggaggttgtgccaagcctgagcctcgacgtcccccttcccggctttctgttggctcttctgaggccagggcatctctatgagggcctcctgctggagccgtctctgtggatctcctctgccatcctggcccatgagtgggtgatgcgctggccaccatctggtgacagtggccgggcaccgctgccaaatgtgggtcccgcatctgcaagcccctccctgggtcccctagggtatggggtggttctgccactgccctcgctcccccaccttggggtgcctctccccctgctcgtgggggagaccctgcctgggatctgctttccagcaaggaatatactttggagggagacacacatgttcttttctggagctctgcagtggccacggcagcccagcccgccaagcaccctggaatgaaaacatcccgctgctgtctgggcctggcctgcactctgctgcctgcgctccagctggctgaggccgggcacgtctgcgggcacagcagcgggggcgccacagtctccctgcagagtgagcgcagctggaaaatgcagctcacgccctttcccagaacacctcgctcttcatggcttggcagctgtccttgcctaggggccagggtgcccaggcactggtggcaggagaagggctacatctggggctgaggcgggctgggtccttttctccctgcagctcccgaggcccagccctggcccagcctggcattcctgaccttagcagcgccatgatctgaagacaggctggcttctgtgaggccacctcagaaagggctttgtgcccaggcagaggcggaagccagctcttccttctggttgaggcaggaatgaggccagcgctgggcaagcccatgcccagggaacgtcacagctgtgggagtacaggggctccgggttctgagcccgtccactgtgcatcgtggccctggcctcaggatggctcgtaccatcattggctgtgcccacagccgagtgggtgatgggattccggctgccccgctggatctgtgctgctgccctctccagggcactgctgtgcccgcacagccgggcgcagatggccagtttgcttgcccccccccccaccatcctcttcctaccttggcttcctccattgacacactggaccctgctggctgcccggggaggtgtttgggggatggtgttgggggaggaggagggccccttgagcctcagtgtgcccatcaggagcgtaaggtcagtgcagcacctgcccacacaggctgtgaagggtgggagtggagagggatgcaagggggtcacaacgcctggctccatgtcagctgcgtgcaggggcaccaggagccggccctcattctccccttgaactggaagggtggccccgaccccagcggcaggtagcatacgtatgaagcgctctccttcctacaccccacaggtgggctcgtctccagacggccctttttgagctggctgtgtttttccatctgtgtaggcaaggacatcgcagactcccctttctcatctccctcgttcagcctccgaggccggagtctccatccctgtgcctgcctgtgggtcccgggaggacctgaggctgcccatgtcacccccggcatctcatcctggggacagttcagccgtgggagggatctgtaaggacagaatgccgctgagcctggggctccccagctagtctcacaccccgtgtctgggacccagagaccctcgtgcagggctctgttgcttggggcctggcagcctcgtcctgtatcagaggctgccacccccacccctcgtggggccagggttgtggccggcctccctggccctccccatggaagtggtaggcggagccagcagccatctgcccagcccggggctgcactgttttttttcaaatgagcaccgtcccaaactgcagcccgttaatttaaacaggatcatttccggccctggaagccgcctcactctccttaaatagaaaggagcacagcgcagagggaaacagatgaggtcatggctcggctggcccagcgaggaaggggccgcagtgggggtggcactgccgcctgtcccctgtcctctccagcgcccacactgcagcccatttcctcaccctgggcctgctctcgggagggacgggcctgggggtcctcttgctgggcggaggggaaccagctcctccaggagaggacggggcctggcagggggcatggggcctccctgggtctggcgtcctgtcctgcccctgccgagggaggagcggttacataagctccgcaggcggcccctccgagccggtccccccagcccagtttccagtgaggcggccagcgcgggcgggggtgccgggcctggcgcacacccgctgctgaccacacgtgtctggaatgtgcagatgtttctttgggggctccgtccggcccccagaccccactcagcatctggtctggggagtgggcgcctggggcactcagctctgagtgtgagactctgaggcaggtctggtttgtctggggccattccctctgctgtggattgggagggccccgggagctgccccacacccagggaagttctcctcagtcccactgttgcattccccgaccccggctcccccggcccaggagcgcctgtggggcagaaggcccagccccaagacttcccggccctgccagcctcaggcttcacccaccctcgcgccaactgtgggcagagcccagggggagggcaggagagccagcgcctggctgggaacacccctgaggggccgaggctccagggcgagggggcccgacctggggttcacacgcccgggtggcgggcagacccgctgcagcatgagacacgtgtcagctacctcgggccggcaggctggccctgctgcccacagccctgggacgtggccccacctgtgacgggtgtggaggggcagcctccaggcctggccacaccctctgctgttgctgctcctgctccaggattggcaagggtgctgggaaggggtgaagacccgtactgtggccacacacctgggacttccttctccacccagtggtgccccagcagccgctaaggagcccgctgggtcccacgctaggatggtcctaactcctcccgccttccagatcggacgctcggcgctggggaccccttgtgtcccggggctggggcaccgtcctgcccccatgggggtgtactcctcccgacaagcttggcttcagcttccctgggagcacatcctggccctcgggcacccatcaggctgtccctgtgcacctggctcccacccttccagctcatagcaggaactggggtgaggagtgcgtggggcagcaagggcctgggaccccagaggaccctgcactctgctctgtgctcttgcctgggcttagggccgctcggtggtcctgctgccagatgcctgggccctgctgtgtcccccatccttgcagggaaccagaacgtgggggcagggcatcagacagcggcgatgatgtcacctggcgggtgcagaggaagcccgaggggcggggtgggggggctggcgcgaggctgcctggctaggccttggcgttcccccagaacggcgatggcaaaagcagatggagacgtgaaaaagtacgggagcaagcgaggtgaggactccacggggacccctgtgctgttccctgtccctgaagcccacacctgagtcctgcccagggcagatgcttccacacccagggggcacctgagtcctacccagggcagacgcttccacaccctgggggctgggggactgcacctggctcctgtctgggccccagcttcattccactgccctgggccctgggagctcggccgagcggggtccccaagaccttgctgcatttctgggccttgggctggggtgagggccgggagaaggagccagcctggagcctggcacgcagggagtgcatggccagaaccggtgacaggcagggctgcctgctggcgtggaagaagtgtccatggcacccccaggcctggttcacagtgggatgggcggggagccggggggctctggggtcctcggctgacctgcccccacccctgccctggcttgtcagctcccagcagcagccactcttgatggattttccagaaaatgaggtgtggccaaacatcttcaggcttttccttctttcctttctcccgtggcctgggtgggagctgctccccatgcctgggggcaggtgcgagagcctgtgcccctccctggggcagtttcacagctgtgtcccttccagggggcctgcctgtgttcaccgtggcctctgcagcacctctcgccccttagggctcctgcgcctcgggtcccggtgcctcatttctccctaaagcattggttctgctgccgccgcagccgctggaaagtccctcctcaggtctaactgcagttcctcacggcacagtgttccccctcgggcatggtgcttgggcagtgggtgtgagtccagctgcctcaccctgtctcgagaatggcctcttgctggtctcccagccaccaccctgtcccaccccacggcggggatggtgtggatgcctagcagcgcggctgtgggcccacccatccttatgggcagtggggagcacctcagcccgtgtccctaccttggtgtagaggaggggacggcagagaagcagggttcagttaggggggaagtggtggccctgccggaggggccgttccctgtgtgcctggcccccagatcctctcccctcccggagcccagggcacaggcataggctctctgagtgtcccacagcccctgggggaagggaactgcacccccaaccgtgccctccatccgcagatggaacgagaagctccgggagccagtgcccagcgtctcatctgtctgggcacccagcccaggtgagggcctggctccaccgtccgtggctggtgctgcttcctggcacggagaaggcctcggctgctctgtcccctcagctggggtggcctctggtccccttctttgttggttcccttctcaagctcttgccctggccccgggccccaccgggcagcctgtgtgtgcgtctctcctgcgccgggtaggctcctgtgggagcggagctccggtgggaggagcagggctggaggctggcaggggctgggcgggtgttcagggatggaggccgccccggcttggggctggctgccgggtggtcattgctgggaagagcaagtctaggcggaggcacctgctgggtcactcgtggggagggtgacacctggggaagtagaggcccgtggcaggaggtgaggcctcggggtcctggggagcaggggggtggtgtgcagacctgcggagccatagtcctgtgccaggagcactactgggagtgcgtgggaccaggaggggtgcccagggtgggcggcagagtgacccccgaggtgcttgaggccgaggggaggtggagttctcggtttgccccagctctctgtctactcacctccgcatcaccagctccaggacctggtttgtaactcgggcagctctgaaaagagagacatgctgccgccctgtggtttctgttgctttttcttcactgactactgacatgggatgtttttcctacggctgtgaccaattgtgcttcttctaattgcctggtttttctttttttgtttttggagttttctctttctttcctccctccctctcaccctccatcctttttttttttatttttattttttgagatggagcttcactcttgcaggatggggtgctggagtgcaggggtgcgatctcagctcactgcaacctctgcctcgcgggttcaagtgattctcctgcctaagcctcctgagtagctggaattacaggtgcttgccaccacgcccgactaattctgtagttttggtagagacagggtgtctccgtgttggtcggtctggtcttgaactcctgacctcaggtgatgcgcccgcctcagcctcccaaagtgctgggattacaggcaggagccattgcacccggctctttccccttctccttttcttctctctctcctccctttctttcttttcttttcttttttttttcttttgagatggagtctcgctctgtcaccaggctggattgcagtggcgtgatcttggctcactgcaaccttcgcctcccgggttcacgtgattctcctgcctcagcctcctgagtggctggcactacaggctcccgccgccatgcccggctaatttttgcatttttagtagagacagggtttcaccctgttggccaggatggtctcgatctcttgatctcatgatccacccaccttggcctcccaaagttctggcattacaggagtgagccaccgtgcccggccatctttctttccttgctttctctttgttttctttcgagaccgggtcttgctctgtcgcccaggctggactgcagtggcacaatcatagctcactgcagcctcgacttccctggctcaagcgatccttcctcctcagccccccgagtagctggaactacagttacacactaccatgcctggctgattctttttttccttgtagagatggggtcttgctatgctgtccatcctggtctcaaactcctggccttcccaaagcactgggtttacaggcataagccaccacacccagtttccttttcttctttttaactggaatagttgacgttttctttattagctgtgtgtcaggagggtatttttggcctttagtatgtcgtgtaagttgctagtgcttttctgagattgtagtttgttttctaattttatttatattttgcgtagaagttgtgtattttagatggagttaggtcggctggtctttgatgttttatttattaattatgtatgtatttatttatttttgaggtagagtctcgccgtttcacccaggctggagtacagtgatgcgatctcagctccctgtagccttgacctctctgggctcaagtgatttttctctcctctacctcccgagtacttgggaccccaggcgcatgccgccatgcctggctaatgtgtattttttgtagatacggggtctcactgtgttgcccagggtggtttcaaaatcctgggcccaggcgatccttccgtctcagctcccacggtgctgtgttaccggcgtgtgcccagtgcctggccgtcttggaggtcttgtttctctgggtttatgcctcgaggtggcgcctgctcccctgtgctccctggtagcctggtagtgagcctgcttctcacacagtcatacctggttgtggtcccacagtgggaccaccctgttgggttcagaacaggagatgggggcccctcgagtctgtgtgggggctgtggacagggttgggagaccttggctctgtgggggactgtggacaggggatggggggccttggccctgcgtgggatgggttgggggtccgtgcccttcctggccctgggtggacaggtccatgtggcactcggcatagggctgagatgggtgcagagggctgaggcccccaggcctctcctggcttggtttccccagatgagtgttcatttgggtcttccatcagaaagtcccctcctgacctctgggagtggggagctcaagggtgggaggccatagcttggggatgctggcaatgtgtgggatgggcccagggaaggcctctggcctactaggggctctggccctgacccacggccactcactcctcagagacgtctcccacaacctgctccgggcgctggacgttgggctcctggcgaacctctcggcgctggcagagctgtgagtgtcccccagtcgtgccagcatgcggggctcactccgggtgggctggcggcaccgcctcttgctgctcagctgtgggggcttccatcagctttgccgaatcccccgtctcttccagggatataagcaacaacaagatttctacgttagaagaaggaatatttgctaatttatttaatttaagtgaaatgtaagttgtggttctttgggtggggtcctggctggaccccaggcccccaatatcccttctgccctcccagttggtccgtgtccccttccaggcttgagaccagatcctgggggcagttcactgcctgcttggagccccccagtgccggcttggttggggcaggggaggcggtgctgtcagggtggctccagggcctggttgccagtggggggctggcatagacccttcccaccagacctggtccccaacacctgcccctgccctgcagaaacctgagtgggaacccgtttgagtgtgactgtggcctggcgtggctgccgcgatgggcggaggagcagcaggtgcgggtggtgcagcccgaggcagccacgtgtgctgggcctggctccctggctggccagcctctgcttggcatccccttgctggacagtggctgtggtgagtgccggtgggtggggccagctctgtccttcccagccaggtgggacctgggccctgcagacactgggcagggctcaggaaggcctctctggggggggcctccgggccaagggaacagcatgggagcctgtgagtgcggcgggcggatgtgggggcgtggggtggagccaggaggagcagaacccggggtccagtggctgcctcttctaggtgaggagtatgtcgcctgcctccctgacaacagctcaggcaccgtggcagcagtgtccttttcagctgcccacgaaggcctgcttcagccagaggcctgcagcgccttctgcttctccaccggccagggcctcgcagccctctcggagcagggctggtgcctgtgtggggcggcccagccctccagtgcctcctttgcctgcctgtccctctgctccggccccccgccacctcctgcccccacctgtaggggccccaccctcctccagcacgtcttccctgcctccccaggggccaccctggtggggccccacggacctctggcctctggccagctagcagccttccacatcgctgccccgctccctgtcactgccacacgctgggacttcggagacggctccgccgaggtggatgccgctgggccggctgcctcgcatcgctatgtgctgcctgggcgctatcacgtgacggccgtgctggccctgggggccggctcagccctgctggggacagacgtgcaggtggaagcggcacctgccgccctggagctcgtgtgcccgtcctcggtgcagagtgacgagagcctcgacctcagcatccagaaccgcggtggttcaggcctggaggccgcctacagcatcgtggccctgggcgaggagccggcccgaggtgagtgtctgctgcccactccccttcctccccagggccatccagatggggcagagcctggtacccccgtcttgggcccacactgaccgttgacaccctcgttcccaccggtctccagcggtgcacccgctctgcccctcggacacggagatcttccctggcaacgggcactgctaccgcctggtggtggagaaggcggcctggctgcaggcgcaggagcagtgtcaggcctgggccggggccgccctggcaatggtggacagtcccgccgtgcagcgcttcctggtctcccgggtcaccaggtgcctgcccccaccccccgaggggccataggttgggagatctctgaagcactggggcagagactgcggctggggagtctcaggaggaaggaggtgggagctgggccggccctggtgagcaggtggcgccggccggtggggccgttcctgtcagctctgcagatgcagaggtggacatgagctgggggcagcctccggacactcctgggcacgccatacgggaggtggcctgcacggggatccctgccggtacccacaggccccgtgggtgggtgctgctgtgagcctgggctggtgggccctggtctccgggctctgagcctcagtttccccatctggaaagggggacagtgatggggctcccagcgggctgctgtgagggtgggaggatggaggagtgccctgagccccctgccatcccacacccgcccccaggagcctagacgtgtggatcggcttctcgactgtgcagggggtggaggtgggcccagcgccgcagggcgaggccttcagcctggagagctgccagaactggctgcccggggagccacacccagccacagccgagcactgcgtccggctcgggcccaccgggtggtgtaacaccgacctgtgctcagcgccgcacagctacgtctgcgagctgcagcccggaggtgtgcggggggccaggcaggggcctgagacgctggctgtggttaggggcctgccgagcgcccgcggtggagcctgggctgaggaggaggggctggtgggggggttttcgggcggctcggtccccagtctgttcgtcctggtgtcctgggccctggcccggcgcctcactgtgcactcgccaccccaggcccagtgcaggatgccgagaacctcctcgtgggagcgcccagtggggacctgcagggacccctgacgcctctggcacagcaggacggcctctcagccccgcacgagcccgtggaggtagtcggccccccacgttctacaacctgccctcctgcctgcccctggaggccttgcctgccctgcccactgtgggtctcgccaaaaaacttgggggccttaatgttgcttgtgcccagtgaagatggttgggaaaatccagagtgcagagaggaaagcgtttactcacattacctccaggccttttctctgagcgtgtgtgagttattcctgaaaggcaggtcaggggtcctgccccccatggacagtttccaccggagtcttcctctcgagcgacaggagccaggcctgtgggggtctgatggctcgctctccttccctcccctcttcctgggaagttcgggtagggggagtctgggcttcaggctgggatggggtctgtggagctgaggcggccccctgcccaccaggtcatggtattcccgggcctgcgtctgagccgtgaagccttcctcaccacggccgaatttgggacccaggagctccggcggcccgcccagctgcggctgcaggtgtaccggctcctcagcacagcaggtgggactctgggtggtgggtggtgggtggtgggcgccgcaggactcggggtggcctctctgagctttcacgtctgctggtcctgtggccaccagagtggttcccagtcttaggtggacagagcaggggttccagagacaccagctcattccaggtgtcctgggggtggattgggtggggcctgcctgggggccggcctgggtcagtcggctggccggagacggacgcagcactgggctgggagtgctgcccaggtggggagacctgtcctcacagcaaggccaggattgctggtgcaggcagttgggcatctctgacggtggcctgtgggcaaatcagggccccaacaccctcccctcctcacagggaccccggagaacggcagcgagcctgagagcaggtccccggacaacaggacccagctggcccccgcgtgcatgccagggggacgctggtgccctggagccaacatctgcttgccgctggacgcctcctgccacccccaggcctgcgccaatggctgcacgtcagggccagggctacccggggccccctatgcgctatggagagagttcctcttctccgttcccgcggggccccccgcgcagtactcggtgtgtggccctgacctgggtctgttccctgcatctcctcaggccaccttcctgtctgctgcccagggtctgggtctgtgcaccagacacacccagcctgcaggcccctcccacgtccttgccacctctgacctccgacctctgcagtgccctcggccctctcccagtgggagaagctctcgcctgggcccttggcacgagctgtgcctcctcttcctctctcccagcacagctgctccttcctgtctgccaggtcttggcctgtgtcctctccccgtgtgtcccccggtctgcaactgtcctgcctgtccttgtcacgagcactgtggggaggctccttgaggtgtggctgacgaagcggggagccctgcgtgtccaccctcatccgtcgtgcgggggtccacgggccatgaccgtgaggacgtgatgcagccctgcctccctctccacaggtcaccctccacggccaggatgtcctcatgctccctggtgacctcgttggcttgcagcacgacgctggccctggcgccctcctgcactgctcgccggctcccggccaccctggtccccgggccccgtacctctccgccaacgcctcgtcatggctgccccacttgccagcccagctggagggcacttgggcctgccctgcctgtgccctgcggctgcttgcagccacggaacagctcaccgtgctgctgggcttgaggcccaaccctggactgcggctgcctgggcgctatgaggtccgggcagaggtgggcaatggcgtgtccaggcacaacctctcctgcagctttgacgtggtctccccagtggctgggctgcgggtcatctaccctgccccccgcgacggccgcctctacgtgcccaccaacggctcagccttggtgctccaggtggactctggtgccaacgccacggccacggctcgctggcctgggggcagtgtcagcgcccgctttgagaatgtctgccctgccctggtggccaccttcgtgcccggctgcccctgggagaccaacgataccctgttctcagtggtagcactgccgtggctcagtgagggggagcacgtggtggacgtggtggtggaaaacagcgccagccgggccaacctcagcctgcgggtgacggcggaggagcccatctgtggcctccgcgccacgcccagccccgaggcccgtgtactgcagggagtcctagtggtgagtatggccgaggctccaccaccagcccccaggcaggtgcctgcagacagggtgctcacacagggcgtgaggcctggcttcccagtgagggcagcagcccagttactggggacgtcggccccgggcaggtcctgctggctggctcctcgggctacctggtgggctttaaattcctggaaagtcacggctctgacagtggctccgctaactcattccactgtctcatttcacaaaatgaatttaaaactctgctccctgacctcacacgagcccccgtgagtctctcacgccctctgctgtgttctcgcctggctaaagcgagtggcttttgaggtggagtctgaacccctgatgggaaactgcgggctgcccgcggtgccaccatgctgggtacatgggggacagggctgtctccatcttgcgggtacctgcctcttcaccaggggccttgggaggggccatcagaaatggcgtgacctgtgcagcctgtcctgggttctgtaagccagtgtaggtgcctcccctcactgctccgagctctctgggtgaggagctggggcaagagcgccgggagggtctgagaagactcagagagaggtggactctttgtagctggtactaggtttgctttacagatggggaaactgaggcacagagaggttgaggcattagtagtactacatggctggctggagagccggacagtgagtgtcccagcccgggcttggctcccatggcatgcagagccccgggcacctcctctcctctgtgccccgcgtgggactctccagcccgacgggaggtgtgtccaggaggcgacaggctaagggcagagtcctccacagagcccaggctgacaccattccccccgcagaggtacagccccgtggtggaggccggctcggacatggtcttccggtggaccatcaacgacaagcagtccctgaccttccagaacgtggtcttcaatgtcatttatcagagcgcggcggtcttcaagctctcagtaggtgggcgggggtggggaggggaggggatggggcggggcagggcgggggcgggctccaccttcacctctgccttctgctctgcttcatgctgcccgaggacgctgccatggctgtgggtgagtggagggagggacgccaatcagggccaggcctctcacctgccacctgggctcactgacgcctgtccctgcagctgacggcctccaaccacgtgagcaacgtcaccgtgaactacaacgtaaccgtggagcggatgaacaggatgcagggtctgcaggtctccacagtgccggccgtgctgtcccccaatgccacgctagcactgacggcgggcgtgctggtggactcggccgtggaggtggccttcctgtgagtgactcgggggccggtttggggtgggcaccaggctcttgtcccagccccagcctcagccgagggacccccacatcacggggttgcttttctgagcctcggtttccctgtctgttgggaggtaactgggtgcacaggagccctgaggctgcacgggagccgggagaggcctcagcacagccgggtgggccctgaatggaggcccggggcgtgactgcagagtggagcctcggctgggtcccaagcaccccctgccccgccaccgcccacccctgtcccggttcactcactgcgtcccaccgccccggcaggtggacctttggggatggggagcaggccctccaccagttccagcctccgtacaacgagtccttcccggttccagacccctcggtggcccaggtgctggtggagcacaatgtcatgcacacctacgctgccccaggtgagggatgagggggtgagggggccactgcctttcaggctctgagcacgggtccccccagctccccagtcaagctgccccccttcctccccaacagccctcactgtgacctcacctgggctgatggcttaggccctactggggtgagggaggggccaggcgtggggggagtggacagggaagctgggcccctgaactgcgccccccgccctccccgggcctggctcttgctgctctgctgccccgagtgcagctgcacttggaggcggtgcgtcctcgccaggcagccctcagtgctgctacacctgtgctccgtcccgcacgtggcttgggagcctgggacccttaaggctgggccgcaggtgcagccgttcaccccgggctcctcaggcggggggcttctgccgagcgggtggggagcaggtgggggtgccgcggctgccccactcgggcctgtccccacaggtgagtacctcctgaccgtgctggcatctaatgccttcgagaaccggacgcagcaggtgcctgtgagcgtgcgcgcctccctgccctccgtggctgtgggtgtgagtgacggcgtcctggtggccggccggcccgtcaccttctacccgcacccgctgccctcgcctgggggtgttctttacacgtgggacttcggggacggctcccctgtcctgacccagagccagccggctgccaaccacacctatgcctcgaggggcacctaccacgtgcgcctggaggtcaacaacacggtgagcggtgcggcggcccaggcggatgtgcgcgtctttgaggagctccgcggactcagcgtggacatgagcctggccgtggagcagggcgcccccgtggtggtcagcgccgcggtgcagacgggcgacaacatcacgtggaccttcgacatgggggacggcaccgtgctgtcgggcccggaggcaacagtggagcatgtgtacctgcgggcacagaactgcacagtgaccgtgggtgcggccagccccgccggccacctggcccggagcctgcacgtgctggtcttcgtcctggaggtgctgcgcgttgaacccgccgcctgcatccccacgcagcctgacgcgcggctcacggcctacgtcaccgggaacccggcccactacctcttcgactggaccttcggggatggctcctccaacacgaccgtgcgggggtgcccgacggtgacacacaacttcacgcggagcggcacgttccccctggcgctggtgctgtccagccgcgtgaacagggcgcattacttcaccagcatctgcgtggagccagaggtgggcaacgtcaccctgcagccagagaggcagtttgtgcagctcggggacgaggcctggctggtggcatgtgcctggcccccgttcccctaccgctacacctgggactttggcaccgaggaagccgcccccacccgtgccaggggccctgaggtgacgttcatctaccgagacccaggctcctatcttgtgacagtcaccgcgtccaacaacatctctgctgccaatgactcagccctggtggaggtgcaggagcccgtgctggtcaccagcatcaaggtcaatggctcccttgggctggagctgcagcagccgtacctgttctctgctgtgggccgtgggcgccccgccagctacctgtgggatctgggggacggtgggtggctcgagggtccggaggtcacccacgcttacaacagcacaggtgacttcaccgttaggtggccggctggaatgaggtgagccgcagcgaggcctggctcaatgtgacggtgaagcggcgcgtgcgggggctcgtcgtcaatgcaagccccacggtggtgcccctgaatgggagcgtgagcttcagcacgtcgctggaggccggcagtgatgtgcgctattcctgggtgctctgtgaccgctgcacgcccatccctgggggtcctaccatctcttacaccttccgctccgtgggcaccttcaatatcatcgtcacggctgagaacgaggtgggctccgcccaggacagcatcttcgtctatgtcctgcagctcatagaggggctgcaggtggtgggcggtggccgctacttccccaccaaccacacggtacagctgcaggccgtggttagggatggcaccaacgtctcctacagctggactgcctggagggacaggggcccggccctggccggcagcggcaaaggcttctcgctcaccgtctcgaggccggcacctaccatgtgcagctgcgggccaccaacatgctgggcagcgcctgggccgactgcaccatggacttcgtggagcctgtggggtggctgatggtggccgcctccccgaacccagctgccgtcaacaaaagcgtcaccctcagtgccgagctggctggtggcagtggtgtcgtatacacttggtccttggaggaggggctgagctgggagacctccgagccatttaccacccatagcttccccacacccggcctgcacttggtcaccatgacggcagggaacccgctgggctcagccaacgccaccgtggaagtggatgtgcaggtgcctgtgagtggcctcagcatcagggccagcgagcccggaggcagcttcgtggcggccgggtcctctgtgcccttttgggggcagctggccacgggcaccaatgtgagctggtgctgggctgtgcccggcggcagcagcaagcgtggccctcatgtcaccatggtcttcccggatgctggcaccttctccatccggctcaatgcctccaacgcagtcagctgggtctcagccacgtacaacctcacggcggaggagcccatcgtgggcctggtgctgtgggccagcagcaaggtggtggcgcccgggcagctggtccattttcagatcctgctggctgccggctcagctgtcaccttccgcctgcaggtcggcggggccaaccccgaggtgctccccgggccccgtttctcccacagcttcccccgcgtcggagaccacgtggtgagcgtgcggggcaaaaaccacgtgagctgggcccaggcgcaggtgcgcatcgtggtgctggaggccgtgagtgggctgcaggtgcccaactgctgcgagcctggcatcgccacgggcactgagaggaacttcacagcccgcgtgcagcgcggctctcgggtcgcctacgcctggtacttctcgctgcagaaggtccagggcgactcgctggtcatcctgtcgggccgcgacgtcacctacacgcccgtggccgcggggctgttggagatccaggtgcgcgccttcaacgccctgggcagtgagaaccgcacgctggtgctggaggttcaggacgccgtccagtatgtggccctgcagagcggcccctgcttcaccaaccgctcggcgcagtttgaggccgccaccagccccagcccccggcgtgtggcctaccactgggactttggggatgggtcgccagggcaggacacagatgagcccagggccgagcactcctacctgaggcctggggactaccgcgtgcaggtgaacgcctccaacctggtgagcttcttcgtggcgcaggccacggtgaccgtccaggtgctggcctgccgggagccggaggtggacgtggtcctgcccctgcaggtgctgatgcggcgatcacagcgcaactacttggaggcccacgttgacctgcgcgactgcgtcacctaccagactgagtaccgctgggaggtgtatcgcaccgccagctgccagcggccggggcgcccagcgcgtgtggccctgcccggcgtggacgtgagccggcctcggctggtgctgccgcggctggcgctgcctgtggggcactactgctttgtgtttgtcgtgtcatttggggacacgccactgacacagagcatccaggccaatgtgacggtggcccccgagcgcctggtgcccatcattgagggtggctcataccgcgtgtggtcagacacacgggacctggtgctggatgggagcgagtcctacgaccccaacctggaggacggcgaccagacgccgctcagtttccactgggcctgtgtggcttcgacacaggtcagtgcgtggcagggccgtcctccatgcccctcacccgtccacacccatgagcccagagaacacccagcttgccaccagggctggcccgtcctcagtgcctggtgggccccgtcccagcatggggagggggtctcccgcgctgtctcctgggccgggctctgctttaaaactggatggggctctcaggccacgtcgccccttgttctcggcctgcagagggaggctggcgggtgtgcgctgaactttgggccccgcgggagcagcacggtcaccattccacgggagcggctggcggctggcgtggagtacaccttcagcctgaccgtgtggaaggccggccgcaaggaggaggccaccaaccagacggtgggtgccgcccgcccctcggccacttgccttggacagcccagcctccctggtcatctactgttttccgtgttttagtgctggtggaggccgcacgctctcccctctctgtttctgatgcaaattctatgtaacacgacagcctgcttcagctttgcttccttccaaacctgccacagttccacgtacagtcttcaagccacatatgctctagtggcaaaagctacacagtcccctagcaataccaacagtgaggaagagccccttcccaccccagaggtagccactgtccccagcccatgtccctgttgctggatgtggtgggccggttctcaccctcacgctcccctctctggaccggccaggaggcttggtgaccctgagcccgtggtggctgctcctgctgctgtcaggcggggcctgctggtgccccagagtgggcgtctgttccccagtccctgctttcctcagctggcctgattgggggtcttcccagaggggtcgtctgaggggagggtgtgggagcaggttccatcccagctcagcctcctgacccaggccctggctaagggctgcaggagtctgtgagtcaggcctacgtggcagctgcggtcctcacacccacacatacgtctcttctcacacgcatccccccaggggccctcagtgagcattgcctgcctcctgctagggtccagctgggtccagtacaccagaacgcacactccagtgtcctctgccctgtgtatgcccttccgccgtccaagttggaaggtggcaaaccggatgagtatcctgggagggagtgagctcaccggcagtggccaggcccctgggaaacctggagtttgggagcagcatcctccatgggtcccccagtccttccagcaggccaaatagacctgtgttggaggtaaccccactcccacgccaggtgctgatccggagtggccgggtgcccattgtgtccttggagtgtgtgtcctgcaaggcacaggccgtgtacgaagtgagccgcagctcctacgtgtacttggagggccgctgcctcaattgcagcagcggctccaagcgaggggtgagtgttgagcggggtgtgggcgggctggggatgggtcccatggccgaggggacggggcctgcaggcagaagtggggctgacagggcagagggttgcgccccctcaccaccccttctgcctgcagcggtgggctgcacgtacgttcagcaacaagacgctggtgctggatgagaccaccacatccacgggcagtgcaggcatgcgactggtgctgcggcggggcgtgctgcgggacggcgagggatacaccttcacgctcacggtgctgggccgctctggcgaggaggagggctgcgcctccatccgcctgtcccccaaccgcccgccgctggggggctcttgccgcctcttcccactgggcgctgtgcacgccctcaccaccaaggtgcacttcgaatgcacgggtgagtgcaggcctgcgtggggggagcagcgggatcccccgactctgtgacgtcacggagccctcccgtgatgccgtggggaccgtccctcaggctggcatgacgcggaggatgctggcgccccgctggtgtacgccctgctgctgcggcgctgtcgccagggccactgcgaggagttctgtgtctacaagggcagcctctccagctacggagccgtgctgcccccgggtttcaggccacacttcgaggtgggcctggccgtggtggtgcaggaccagctgggagccgctgtggtcgccctcaacaggtgagccaggccgtgggagggcgcccccgagactgccacctgctcaccaccccctctgctcgtaggtctttggccatcaccctcccagagcccaacggcagcgcaacggggctcacagtctggctgcacgggctcaccgctagtgtgctcccagggctgctgcggcaggccgatccccagcacgtcatcgagtactcgttggccctggtcaccgtgctgaacgaggtgagtgcagcctgggaggggacgtcacatctgctgcatgcgtgcttgggaccaagacctgtacccctgcctggagctttgcagagggctcatcccgggccccagagataaatcccagtgaccctgaagcagcaccccgaccttccgctcccagcagccacacccaccgggccctctccggcgtctgctttccacaatgcagcccccgcccaggagggcccatgtgcttaccctgttttgcccatgaagaaacagctcagtgttgtgggtcagtgcccgcatcacacagcgtctagcacgtaactgcaccccgggagtcgtgggcatctgctggcctcctgccggcctcctgcgctgctgacagcttgctgtgccccctgcctgccccagtacgagcgggccctggacgtggcgcagagcccaagcacgagcggcagcaccgagcccagatacgcaagaacatcacggagactctggtgtccctgagggtccacactgtggatgacatccagcagatcgctgctgcgctggcccagtgcatggtaggatggccccacctgctcaccctgccccgcatgcctgccagggcactgggttcagccccccagggcagacgggcagcttggccgaggagctgagcctccagcctgggctccttcctgccatggcgttcctcggtctctgacctgcttcagtagcctcagccgttctgtcctgtgtgaacgcagggtgcctctcgggggacccagggtgtaaagaggggcccagatgtggggagggactaagaagatgctgctctgtgccctccactctcccctcccctcccctcccccttccctcccctagcccctcccctcctcccctcccctagcccttcccctcctcccctcccctagccctttcccttcttcccccccagcccttcccctcctcccctcccctagcccttcccctcctcccctcccctaccccttcccctcctcccctcccctagaccttcccctcacctcctcccgctgagcccctccactcgtcccccagcccctccctcccctagcccctcccctcccccttcctcccctcctccccctcccctcctccccctccctcttcctccccctcccctcctcccccttcctcccctctcctccccctcccctcctgtcccccctcctcccctcctccctcctcccctcctcccccctcctcctccccctcctccctcctccctcctccccctcctcctcctcccctcctccctcctcccctcctcccctcccctcctccccctcccccctcccttcctccccctcccccctcccctcctccccctctcctcctcccatccctcctcccatccctcctccccgttcccattctctcccctcccccttccatttctccctcctccccctgccctcctctcctcctcacctccccttctccgctcctttcttctcctccctccctttctctcctccctccccttctccccttctcctcttctccccttctcctctcttttcatccttcccttcttccctcctttcctcctcttttccctcttctcccccctcctcccctccttcctcctcccattccccctcctcccccctcccattccccctcctcccctccttcctcctcccattacccctcctctcctcccctcctcccacccccctctcctcccggctcctctcctcccctcctcatccccctcctctccttccctcctaacccccctcctctcctcccctcctcatccccctcctctccttccctcctcctatcccccctcctctcctcccctcctcctattccccctcctctcctcccctccttcctcctcctctcctcccatgccccctcctcccctcctcccatccccctcctcccctcctccctcctcccatcccatccccctcctctcctccccttctctcccctcctctcctcccctcctctcctctcctcctctcctcccctcctcccatcccccctcctcccatcccccctcctctcctccccactcctctcctccccactcctctcctcccctcatccccctcctctctcctcccctccccctcctctccttccctcctcctttcctcccctccccctccttccccctcctccccctccttctccccatcccccttccccttctcctcctctcccctcccccttctctttttccctcctcctcccttcctcctcccctcttctccccttttcccttttctcttcctctcctccccttctcccctcctgtcctccctccctttctctctttctttcctccctttccttctcccctgttctcctcccttcccttctccccttttcttccctcctcctttcctcccctcctccttttctctgtttctcttcctttcccctccactttccccttcctttcccctctcctttctccttcctttcctctccccttctcttccttttcctctctccccttcttttccctcttcccctcccctcctcttcccctcccctcctcttcccctcccctcctcttcccctcccctcctcttcccctctcctcctcttcccctcccctcctctttccctcccctcttctcctcccctcctctcccctcttcccctcccctcctcttccctccccttcccctcccctcctcttccctccccttcccctcccctcctcttccctccccttcccctcctcttccttcctctcttcccctcccctcctcttccctcccctcttcccctccccttctcttctcctccccttctcttcccctccccttttcttccctctccttgtcttccctgccctcctcttccctcccctcctcttccctcccctcttcccctctcctcctcttccctcccctcttcctctttcctcttcccctcccctcctcctccctcccctttcccctcttcccctcccctccgcttccctcccctttctcccccttctctcccctcccctctccccccttctctcccctcccctctcccccttctctcccctcccctctcccccttctctcccctctcctctcccccttctctcccccttctctcccccttctctctccccttctctcccccttctctcccctccccccttctctcccctcccctctcccccttctctcccctcccctctcccctgtcctctcctctccacccttctctcccctcccctctcctctcccccttccctctcctctcccccttctctcccctcccctctcctctccccccttttctccactcccctctcctctctcccctcctcctccgctctcatgtgaagaggtgccttgtgtggtcggtgggctgcatcacgtggtccccaggtggaggccctgggtcatgcagagccacagaaaatgcttagtgaggaggctgtgggggtccagtcaagtgggctctccagctgcagggctgggggtgggagccaggtgaggacccgtgtagagaggagggcgtgtgcaaggagtggggccaggagcggggctggacactgctggctccacacaggggcccagcagggagctcgtatgccgctcgtgcctgaagcagacgctgcacaagctggaggccatgatgctcatcctgcaggcagagaccaccgcgggcaccgtgacgcccaccgccatcggagacagcatcctcaacatcacaggtgccgcggcccgtgccccatgccacccgcccgccccgtgcggccctttcctctgcctccctcctccccccaaccgcgtcgcctttgccccatcccatcttcgtccccctcccctccccccaattcccatcctcatccccctcccccaattcccattctcctccccctcccccttccctattaccatcccttttctccatctctctccccttttctccatttccccccccgtcctccccgtccttttgtccattcccctcatcttcctcatccccctcatcccccttcccctcccttatcccccttcccctccctttccccctgctcctcttcttctcccttctcttttctctacccttttccttcctttttcctccctctccccatcatccccctcatcttcgtcctcatccccatcaccttccccctcccccctccaccactctctctccagcttcccccttccttctgcctgcacctcgctctctgccccctcaggttccccctttctcccagcccccaccctccggctccccctttttgcctgcccccaccctccctctacctccctgtctctgcactgacctcacgcatgtctgcaggagacctcatccacctggccagctcggacgtgcgggcaccacagccctcagagctgggagccgagtcaccatctcggatggtggcgtcccaggcctacaacctgacctctgccctcatgcgcatcctcatgcgctcccgcgtgctcaacgaggagcccctgacgctggcgggcgaggagatcgtggcccagggcaagcgctcggacccgcggagcctgctgtgctatggcggcgccccagggcctggctgccacttctccatccccgaggctttcagcggggccctggccaacctcagtgacgtggtgcagctcatctttctggtggactccaatccctttccctttggctatatcagcaactacaccgtctccaccaaggtggcctcgatggcattccagacacaggccggcgcccagatccccatcgagcggctggcctcagagcgcgccatcaccgtgaaggtgcccaacaactcggactgggctgcccggggccaccgcagctccgccaactccgccaactccgttgtggtccagccccaggcctccgtcggtgctgtggtcaccctggacagcagcaaccctgcggccgggctgcatctgcagctcaactatacgctgctggacggtgcgtgcagcgggtggggcacacgcggccccctggccttgttcttggggggaaggcgtttctcgtagggcttccatgggtgtctctggtgaaatttgctttctgtttcatgggctgctgggggcctggccagagaggagctgggggccacggagaagcaggtgccagctctggtgcagaggctcctatgctttcaggcccgtggcagagggtgggctcaggagggccatcgtgggtgtcccccgggtggttgagcttcccggcaggcgtgtgacctgcgcgttctgccccaggccactacctgtctgaggaacctgagccctacctggcagtctacctacactcggagccccggcccaatgagcacaactgctcggctagcaggaggatccgcccagagtcactccagggtgctgaccaccggccctacaccttcttcatttccccggggtgagctctgcgggccagcctggcagggcagggcagggcatcatgggtcagcattgcctgggttactggccccatggggacggcaggcagcgaggggactggaccgggtatgggctctgagactgcgacatccaacctggcggagcctgggctcacgtccgctaccccttccctgcccaggagcagagacccagcggggagttaccatctgaacctctccagccacttccgctggtcggcgctgcaggtgtccgtgggcctgtacacgtccctgtgccagtacttcagcgaggaggacatggtgtggcggacagaggggctgctgcccctggaggagacctcgccccgccaggccgtctgcctcacccgccacctcaccgccttcggcgccagcctcttcgtgcccccaagccatgtccgctttgtgtttcctgtgagtgaccctgtgctcctgggagcctctgcagagtcgaggagggcctgggtgggctcggctctatcctgagaaggcacagcttgcacgtgacctcctgggcccggcggctgtgtcctcacaggagccgacagcggatgtaaactacatcgtcatgctgacatgtgctgtgtgcctggtgacctacatggtcatggccgccatcctgcacaagctggaccagttggatgccagccggggccgcgccatccctttctgtgggcagcggggccgcttcaagtacgagatcctcgtcaagacaggctggggccggggctcaggtgaggggcgcagcggggtggcagggcctcccctgctctcactggctgtgctggttgcaccctctgggagtgagtctcgtcgcaggcgtcagaacaaggcagtttttgcagtgctgtgtgaagggctcgtgtgttcatcctgggaatgacctcgtgagcactcactgtccctgaggactaggacagctcctagctggaagtaggtgccagtcagtcagggtgggcagcccacgttctgcacagtagcgtggccccacaagtgacgtgagcatcgctaccactgtgggagactgtgcatccacccgcgatcctgactgcatagctcgtctctcagacggaggcgccagcaccctccccgtggctgtttcttcagtacctccattttcctttcattggaattgcccttctggcattccctttttgttttcgtttttctttttttagagacggagtctcactctgttgcccaggctggagtgcaatggcatgatcttggctcacagcaacttccagctcccgggtttaagccattccccttaagcgattctcctgagtagctgggagtacaggtgcacaccaccacacccagttaatttttcaccatgtcagccaggcgaactcctgacctcaggtgatccgcctgcctcggcctgccagagtgctgggatgacaggtgtgagccaccacacctggctgtgttcccattttttatctctgtgctgctttcctcttcattgcccagttctttcttttgattacctacttttaaaaactgtcggccgggcgcggtggctcacacctgtaatccgagcactttgggaggccaggcaggcaaatcacggggtcaggagatcgagaccatcctggctaacggtgaaaccctgtctctaataaaaagtacaaaaaaattagcccggcgtagtggcaggcgcctgtagtcccagctccttgggagactgaggcaggagaatggcgtgaacccgggaggcggagcttgcagtgagctgagattgcgccactgcactccagcctgggtgacacagcaagactccatctcaaaaaaaaaagaaaaaaaatactgtcacctgggtctgtcactgggagaggaggtgacacagcttcacgctttgcagtctgtgcatgaactgagggacgggtgtgtggtgcgggtcaccggttgtggcatgactgaggcgtggacaggtgtgcagtgcgggtcactggttgtggtgtggactgaggcgtgtgcagccatgtttgcatgtcacaagttacagttctttccatgtaacttaatcatgtccttgaggtcctgctgttaattggacaaattgcagtaaccgcagctccttgtgtatggcagagccgtgcaaagccgggactgcctgtgtggctccttgagtgcgcacaggccaaagctgagatgacttgcctgggatgccacacgtgttgggcagcagaccgagcctcccacccctccctcttgcctcccaggtaccacggcccacgtgggcatcatgctgtatggggtggacagccggagcggccaccggcacctggacggcgacagagccttccaccgcaacagcctggacatcttccggatcgccaccccgcacagcctgggtagcgtgtggaagatccgagtgtggcacgacaacaaaggtttgtgcggaccctgccaagctctgcccctctgcccccgcattggggcgccctgcgagcctgacctccctcctgcgcctctgcagggctcagccctgcctggttcctgcagcacgtcatcgtcagggacctgcagacggcacgcagcgccttcttcctggtcaatgactggctttcggtggagacggaggccaacgggggcctggtggagaaggaggtgctggccgcgagtaaggcctcgttccatggtcccactccgtgggaggttgggcagggtggtcctgccccgtggcctcctgcagtgcggccctccctgccttctaggcgacgcagcccttttgcgcttccggcgcctgctggtggctgagctgcagcgtggcttctttgacaagcacatctggctctccatatgggaccggccgcctcgtagccgtttcactcgcatccagagggccacctgctgcgttctcctcatctgcctcttcctgggcgccaacgccgtgtggtacggggctgttggcgactctgcctacaggtgggtgccgtaggggtcggggcagcctcttcctgcccagcccttcctgcccctcagcctcacctgtgtggcctcctctcctccacacagcacggggcatgtgtccaggctgagcccgctgagcgtcgacacagtcgctgttggcctggtgtccagcgtggttgtctatcccgtctacctggccatcctttttctcttccggatgtcccggagcaaggtgggctggggctggggacccgggagtactgggaatggagcctgggcctcggcaccatgcctagggccgccactttccagtgctgcagccagagggaaaggcgtccaccaaaggctgctcgggaagggtcaacacacttgagcagccttagctagactgaccagggagaaagagagaagactcagaagccagaatggtgaaagaacgagggcactttgctaagcagacgccacggacgactgcacagcagcacgccagataactcagaagaagcaagcacgcggctgtgcacgcttccgaaatgcactccagaagaaaatctcagtacatctataggaagtgaagaggctgagttagtcccttagaaacgtcccagtggccgggccgggtgtggtggctcacgcctgtaatcccaacacttcaggtggccgaggtgggcggatctgagtccaggagtttgagaccagcctgggcaacatagcaagaccccatctatataaaacattaaaaagggccaggcgcggtggctcacgcctgtaatcccagcactttgggaggccgaggcgggcagatcacttgaggtcaggagttcgagaccagcctggccaacacaatgaaaccccgactctactacaaatacaaaaacttagctgggcatggtggcgggcgcctgtagtcccagctactcgagaggctgaggcaggagaatggcatgaacccaggaggcggagcttgcagtgagccgagattgcgccactgcactccatcctgggcaacggagcaagactccatctccaaaaaaaaaaaaaaaaaatcccacaaagaaaagctcaggctcagagccttcacgatagaatttttctaagcagttaaggaagaattaacaccaatccttcacagactctttccaagaatacagcaggtgggaacgcttcccattcatacggaaacgggaggccgcaccccttaggaatgcacacgtggggtcctcaagaggttacatgcaaactaaccccagcagcacacagagaaggcgcataagccgcgaccaggaggggttgctcccgagtccgtggcaggaaccagaggccacatgtggctgctcgtatttaagttaattaaaatggaacgatggccgggtgtggtggctcacacctgtaatcccagcactttgggaggcggaggcgggcagatcacttgaggtcaggagttccaagaccagcctggccaacacagtgaaaccccgtctctactaaaaatacaaaaaattagctgggcatggtggcaggcacctgtaatcccagctactcaggaggctgagccaggacaatcgcctgaacgcgggaggtggaggttgcagtgagctgagattgcgccattgcactccagcctgggtgacagcgagactccatctaaaaaagaaaatatgaaatttaaaactctgttccttagctgcaccagtctgctgtcaagtgttcagtggcacacgtcgcgaggggctgccatcacggacggtgcagatgtcccatatatccagcattctaggacattctgtcagatggcaccgggctctgtcctgtctgctgaggaggtggcttctcatccctgtcctgagcaggtctgagctgccgcccgctgaccactgccctcgtcctgcaggtggctgggagcccgagccccacacctgccgggcagcaggtgctggacatcgacagctgcctggactcgtccgtgctggacagctccttcctcacgttctcaggcctccacgctgaggtgaggactctactgggggtcctgggctgggctgggggtcctgccgccttggcgcagcttggactcaagacactgtgcacctctcagcaggcctttgttggacagatgaagagtgacttgtttctggatgattctaagaggtgggttccctagagaaacctcgagccctggtgcaggtcactgtgtctggggtgccgggggtgtgcgggctgcgtgtccttgctgggtgtctgtggctccatgtggtcacaccacccgggagcaggtttgctcggaagcccagggtgtccgtgcgtgactggacgggggtgggctgtgtgtgtgacacatcccctggtaccttgctgacccgcgccacctgcagtctggtgtgctggccctccggcgagggaacgctcagttggccggacctgctcagtgacccgtccattgtgggtagcaatctgcggcagctggcacggggccaggcgggccatgggctgggcccagaggaggacggcttctccctggccagcccctactcgcctgccaaatccttctcagcatcaggtgagctggggtgagaggagggggctctgaagctcacccttgcagctgggcccaccctatgcctcctgtacctctagatgaagacctgatccagcaggtccttgccgagggggtcagcagcccagcccctacccaagacacccacatggaaacggacctgctcagcagcctgtgagtgtccggctctcgggggaggggggattgccagaggaggggccgggactcaggccaggcagccgtggttcccgcctggggtagggtggggtggggtgccagggcagggctgtggctgcaccacttcacttctctgaacctctgttgtctgtggaaagagcctcatgggatccccagggccccagaaccttccctctagggagggagcaggctcatggggctttgtaggagcagaaaggctcctgtgtgaggctggccggggccacgtttttatcttggtctcagagcagtgagaaattatgggcgggtttttaaataccccatttttggccgggcgcggtggctcacacgtgtaatcccagcactttgggaggccgaggtgggcagatgacctgaggtcagcagttcgagaccagcctggccaacatggcgaaaccccgtctctactaaaaatacaaaaaattagccgggcatgctggcaggcgcctgtagtcccagttactcgggagactgaggtaggagaatcgattgaacctggtaggtgaaggttgtagtgagccgagatcgcgccactgcactccagcctgggcaacaagagcgaaactccgtctcaaaaacaaaaaaattcctcaatttcttggttgttttgtaacttatcaacaaatggtcatatagaggttaccttgtatgtagtcacgcacatagtcacgcacatggcagccggcggcggagcgcacccacggcgtgttcccacgcgtgtgaccccgggctctgccatgccctcctatgctcaggtgtgctgaggtccacacggccctgccgttgcactgcagctgcctgcaggattcagtgcagtggcatgcagtgcaggtgcggtgccccggagccacaggccacaccacagggcctgcatgcacaggggctgcggtgtctgggtttgggtaactacgccctgtgacatttgcacagcaacagaattacctaatgacgcatttctcagaacacatccctggcactaagtggtgcgtgactgctgcttttgcatccacatctagtttgatttgtgtgttattcctttgagtgcttctcattgttaagcaaccaagaactaaagaggtatgaactgcccctggactcaaacaaaaaggaaaacttcctgatttacaaaaggcagataaccatcacatgagggcatctttatgaataaattgctggttggttttaaaaatacagagtatggggaaatccaggggtagtcactacatgctgaccagccccaggtatctccggcccaaagctctgtgaaatccagattcagtgcttccgcggggatttctgacggcagctcagactccgcatccacacagagcgcgtggccctcaccctcccggcttcctcaacccttggccgtcccttgctcggacagtgcttcgggctgaccaggtcggaggcttgggtttgtcctggacccctctgcgtccttcctcactgcagcctccagcgcgtcccgtggctcctttcccaacgcagagcacggccttccctgcgcctgagcctgcaccctccgtcctggcggcgcctctgccctggcattccctgccactccatgcctccctattggccattctccgtctctgccagcgagagcctgctccctgagtcagaccctgagtcatttgtgttgctataaaggaatagttgaggctgggttattttttatttttatttatttttttgagatggagtctctgttgcccagactggagtgcagtcgcatgatctcggctcactgcaaagtctgcctcccacgttcaagcagttatctgcctcagcctcccaagtagctaagattacaggcgcccgccgccacagccggctaattttttgtgtgtgtgttttagtagagaggaggtttcaccatcttagccaggctggtcttgaactcctgacctcgtgatccacccatctcagcctcccaaaatgctgagattacaggcgtgagccaccacgcctgaccaagttgaggctaggtcattttttaattttttgtaaagacagggtctcactgtctccaactcctgagctcaagtgatcctcctgcctcagcctcctgaagtgctgggattacaggcttgagacactgcgcccagccaagagtgtcttttatcctccgagagacagcaaaacaggaagcattcagtgcagtgtgaccctgggtcaggccgttctttcggtgatgggctgacgagggcgcaggtacgggagagcgtcctgagagcccgggactcggcgtctcgcagttggtctcgtcctccccctcaacgtgtcttcgctgcctctgtacctcttctctagcagctctgggaccgggcatatcagcatggtggcccgatgcagtggcacagcctcggtggtcactggctcctggagacacaagcagatctctggcctcagggagccctacacactgttgggatttgaaaggcattcatatgtttccttgtccagaagttaattttaggccataaacctgcatgggacagacacactggcgtctctagattgtagagatgcttgttggatggttgagacccaatcatagtttgcagggttgaaggggggctcattgcaccctgagagactgtgcactgctgtaagggcagctggtcaggctgtgggcgatgggtttatcagcagcaagcgggcgggagagggacgcaggcggacgcctgacttcggtgcctggagtggctcttggttccctggctcccagcaccactcccactctcgtttggggtagggtcttccggctttttgtcggggggaccctgtgacccaagaggctcaagaaactgcccgcccaggttaacatgggcttggctgcaactgcctcctggaggccgggatgaattcacagcctaccatgtccctcaggtccagcactcctggggagaagacagagacgctggcgctgcagaggctgggggagctggggccacccagcccaggcctgaactgggaacagccccaggcagcgaggctgtccaggacaggtgtgcttgcgtagccccgggatgcccctagcccctccctgtgagctgcctctcacaggtctgtctctgcttccccaggactggtggagggtctgcggaagcgcctgctgccggcctggtgtgcctccctggcccacgggctcagcctgctcctggtggctgtggctgtggctgtctcagggtgggtgggtgcgagcttccccccgggcgtgagtgttgcgtggctcctgtccagcagcgccagcttcctggcctcattcctcggctgggagccactgaaggtgagggggctgccaggggtaggctacaggcctccatcacgggggacccctctgaagccaccccctccccaggtcttgctggaagccctgtacttctcactggtggccaagcggctgcacccggatgaagatgacaccctggtagagagcccggctgtgacgcctgtgagcgcacgtgtgccccgcgtacggccaccccacggctttgcactcttcctggccaaggaagaagcccgcaaggtcaagaggctacatggcatgctgcgggtgagcctgggtgcggcctgtgcccctgccacctccgtctcttgtctcccacctcccacccatgcacgcaggacactcctgtccccctttcctcacctcagaaggcccttaggggttcaatgctctgcagcctttgcccggtctccctcctaccccacgccccccacttgctgccccagtccctgccagggcccagctccaatgcccactcctgcctggccctgaaggcccctaagcaccactgcagtggcctgtgtgtctgcccccaggtggggttccgggcagggtgtgtgctgccattaccctggccaggtagagtcttggggcgccccctgccagctcaccttcctgcagccacacctgccgcagccatggctccagccgttgccaaagccctgctgtcactgtgggctggggccaggctgaccacagggcccccccgtccaccagagcctcctggtgtacatgctttttctgctggtgaccctgctggccagctatggggatgcctcatgccatgggcacgcctaccgtctgcaaagcgccatcaagcaggagctgcacagccgggccttcctggccatcacgcggtacgggcatccggtgcactggtctgtcttctgggctttagttttgcctttagtccagccagaccctaggggacatgtggacatgtgtagatacctttgtggctgctagaactggaggtaggtgctgctggcatcagtaggcagaggggagggacacaggtccgtgtcttgcagtgcacaggacgggcccatgacagacaactgtctgccccagaacatccccaggataaggctgagaagcccaggtctagccgtggccagcagggcagtgggagccatgttccctgggtctctggtggccgctcactcgaggcgggcatggggcagtaggggctggagcgtgtgactgatgctgtggcaggtctgaggagctctggccatggatggcccacgtgctgctgccctacgtccacgggaaccagtccagcccagagctggggcccccacggctgcggcaggtgcggctgcaggaaggtgagctggcagggcgtgccccaagacttaaatcgttcctcttgttgagagagcagcctttagcggagctctggcatcagccctgctccctagctgtgtgacctttgccctcttaacaccgccgtttccttctctgtatatgagagatggtaacgttgtctaattgatggctgctgggagggttccctggggtggcgccgaaccagagctcaggcgagctggccagcaggaaacactcctgttgggttttgatgaggccctggccccggcctggggctctgtgtgtttcagcactctacccagaccctcccggccccagggtccacacgtgctcggccgcaggaggcttcagcaccagcgattacgacgttggctgggagagtcctcacaatggctcggggacgtgggcctattcagcgccggatctgctggggtgagcagagcgagggccccgggcgtctacgccaaggacaagggagtagttctccaggagtgccgcggcctcctgaccagcctggctccggggtgccggaagggctggggtgcggcacccacgccacccctctccggcagggcatggtcctggggctcctgtgccgtgtatgacagcgggggctacgtgcaggagctgggcctgagcctggaggagagccgcgaccggctgcgcttcctgcagctgcacaactggctggacaacaggtgggagctccctcccctgccctctccggggtggccgcagtcaccagccaggagcccaccctcactcctccggcccccgctggcctaggcggcttccacagcccctcagccacgcctgcactgcgcggtccccgcagctcccgccctgccacccgctcctactgacccgcaccctctgcgcaggagccgcgctgtgttcctggagctcacgcgctacagcccggccgtggggctgcacgccgccgtcacgctgcgcctcgagttcccggcggccggccgcgccctggccgccctcagcgtccgcccctttgcgctgcgccgcctcagcgcgggcctctcgctgcctctgctcacctcggtacgcccgtccccggccagaccccgcgcctcccaccggcagcgtcccgccccctcgcggggccccgcccggcagcgtctcacccctcgcagcgccccgccccctcgcagcgtcccgccccctcgcagggccccgccccggcagcgtcccgccccctcgtagggccccgccccggcagcgtcccgccccctcgcagggccccgccccggcagcgtccctcccgccctcctgaccgcgccccccacaggtgtgcctgctgctgttcgccgtgcacttcgccgtggccgaggcccgtacttggcacagggaagggcgctggcgcgtgctgcggctcggagcctgggcgcggtggctgctggtggcgctgacggcggccacggcactggtacgcctcgcccagctgggtgccgctgaccgccagtggacccgtttcgtgcgcggccgcccgcgccgcttcactagcttcgaccaggtggcgcagctgagctccgcagcccgtggcctggcggcctcgctgctcttcctgcttttggtcaaggtgagggctgggccggtgggcgcggggctgggcgcacaccccagggctgcaagcagacagatttctcgtccgcaggctgcccagcagctacgcttcgtgcgccagtggtccgtctttggcaagacattatgccgagctctgccagagctcctgggggtcaccttgggcctggtggtgctcggggtagcctacgcccagctggccatcctggtaggtgactgcgcggccggggagggcgtcttagctcagctcagctcagctgtacgccctcactggtgtcgccttccccgcagctcgtgtcttcctgtgtggactccctctggagcgtggcccaggccctgttggtgctgtgccctgggactgggctctctaccctgtgtcctgccgagtcctggcacctgtcacccctgctgtgtgtggggctctgggcactgcggctgtggggcgccctacggctgggggctgttattctccgctggcgctaccacgccttgcgtggagagctgtaccggccggcctgggagccccaggactacgagatggtggagttgttcctgcgcaggctgcgcctctggatgggcctcagcaaggtcaaggaggtgggtacggcccagtgggggggagagggacacgccctgggctctgcccagggtgcagccggactgactgagcccctgtgccgcccccagttccgccacaaagtccgctttgaagggatggagccgctgccctctcgctcctccaggggctccaaggtatccccggatgtgcccccacccagcgctggctccgatgcctcgcacccctccacctcctccagccagctggatgggctgagcgtgagcctgggccggctggggacaaggtgtgagcctgagccctcccgcctccaagccgtgttcgaggccctgctcacccagtttgaccgactcaaccaggccacagaggacgtctaccagctggagcagcagctgcacagcctgcaaggccgcaggagcagccgggcgcccgccggatcttcccgtggcccatccccgggcctgcggccagcactgcccagccgccttgcccgggccagtcggggtgtggacctggccactggccccagcaggacaccccttcgggccaagaacaaggtccaccccagcagcacttagtcctccttcctggcgggggtgggccgtggagtcggagtggacaccgctcagtattactttctgccgctgtcaaggccgagggccaggcagaatggctgcacgtaggttccccagagagcaggcaggggcatctgtctgtctgtgggcttcagcactttaaagaggctgtgtggccaaccaggacccagggtcccctccccagctcccttgggaaggacacagcagtattggacggtttctagcctctgagatgctaatttatttccccgagtcctcaggtacagcgggctgtgcccggccccaccccctgggcagatgtcccccactgctaaggctgctggcttcagggagggttagcctgcaccgccgccaccctgcccctaagttattacctctccagttcctaccgtactccctgcaccgtctcactgtgtgtctcgtgtcagtaatttatatggtgttaaaatgtgtatatttttgtatgtcactattttcactagggctgaggggcctgcgcccagagctggcctcccccaacacctgctgcgcttggtaggtgtggtggcgttatggcagcccggctgctgcttggatgcgagcttggccttgggccggtgctgggggcacagctgtctgccaggcactctcatcaccccagaggccttgtcatcctcccttgccccaggccaggtagcaagagagcagcgcccaggcctgctggcatcaggtctgggcaagtagcaggactaggcatgtcagaggaccccagggtggttagaggaaaagactcctcctgggggctggctcccagggtggaggaaggtgactgtgtgtgtgtgtgtgtgcgcgcgcgcacgcgcgagtgtgctgtatggcccaggcagcctcaaggccctcggagctggctgtgcctgcttctgtgtaccacttctgtgggcatggccgcttctagagcctcgacacccccccaacccccgcaccaagcagacaaagtcaataaaagagctgtctgactgcaatctgtgcctctatgtctgtgcactggggtcaggactttatttatttcactgacaggcaataccgtccaaggccagtgcaggagggagggccccggcctcacacaaactcggtgaagtcctccaccgaggagatgaggcgcttccgctggcccacctcatagccaggtgtgggctcggctggagtctgtgcaggggctttgctatgggacggagggtgcaccagaggtaggctggggttggagtaggcggcttcctcgcagatctgaaggcagaggcggcttgggcagtaagtctgggaggcgtggcaaccgctctgcccacacacccgccccacagcttgggcagccagcacaccccgctgagggagccccatattccctacccgctggcggagcgcttgatgtggcggagcgggcaatccacttggaggggtagatatcggtggggttggagcggctatgatgcacctgtgaggccatctggggacgtaggcagggggtgagctcactatcaggtggcacctgggcctgtcccaccagctcacgcctggacccacccccactcacatttgcgtgcagggccatctggcgggccacgaagggcaggttgcggtcagacacgatcttggccacgctgg

SEQ ID NO: 81 - DNA, 496 bp, Homo sapiens
tttttataataatttttgtaatttactttggatttataatatttctacataatgacatttggcaattttttgtttggttccccaatagtgaatccgaaactattaaagtggccaaaaatgatttcctaaggccctggaaaactcaggaatgcatccacttgcacttttcccatgcatggggaatcttcagagttttgcagccatgaagttaatatgtggtttcacaaggggaaacagtggcagaccacgcttgaattcggtcatgttctgaatcacttcaggttgtggcaaggctggtgcttgtgacaaatttatgtcattttgacatgggaactctccaacaacaggacaagaatccatttccctggcaagaacatggacggataccttatgtctccttggagcatctactgccaacatttccttgtagaatttgatgaaatcttccttggtaagtgtcttaaatatggcacctcagtgttatcctgtaaaatta

SEQ ID NO: 82 - DNA, 3262 bp, Homo sapiens
agggggcgaaggcggcggtggtgaggaagatactttggttagtgaccacatcgcagcatgttgagtcaagtttaccgctgtgggttccagcccttcaaccaacatcttctgccctgggtcaagtgtacaaccgtcttcagatctcattgtatccagccttcagtcatcagacatgttcgttcttggagcaacatcccgtttatcactgtacccctcagtcgtacacatggaaagtccttcgcccaccgcagtgagctgaagcatgccaagagaatcgtggtgaagctcggcagtgccgtggtgacccgaggggatgaatgtggcctggccctggggcgcttggcatctattgttgagcaggtatcagtgctgcagaatcagggcagagagatgatgctggtgaccagtggagccgtagcctttggcaaacaacgcttgcgccatgagatccttctgtctcagagcgtgcggcaggccctccactcggggcagaaccagctgaaagaaatggcaattccagtcttagaggcacgagcctgtgcagctgccggacagagtgggctgatggccttgtatgaggctatgtttacccagtacagcatctgtgctgcccagattttggtgaccaatttggatttccatgatgagcagaagcgccggaacctcaatggaacacttcatgaactccttagaatgaacattgtccccattgtcaacacaaatgatgctgttgtccccccagctgagcccaacagtgacctgcagggggtaaatgttattagtgttaaagataatgatagcctggctgcccgactggctgtggaaatgaaaactgatctcttgattgttctttcagatgtagaaggcctttttgacagccccccaggttcagatgatgcaaagcttattgatatattttatcccggagatcagcagtctgtgacatttggaaccaagtctagagtgggaatgggtggcatggaagccaaggtgaaagcagccctctgggctttgcaaggtggcacttctgttgttattgccaatggaacccacccaaaggtgtctgggcacgtcatcacagacattgtggaggggaagaaagttggtaccttcttttcagaagtaaagcctgcaggccctactgttgagcagcagggagaaatggcgcgatctggaggaaggatgttggccaccttggaacctgagcagagagcagaaattatccatcatctggctgatctgttgacggaccagcgtgatgagatcctgttagccaacaaaaaagacttggaggaggcagaggggagacttgcagctcctctgctgaaacgtttaagcctctccacatccaaattgaacagcctggccatcggtctgcgacagatcgcagcctcctcccaggacagcgtgggacgtgttttgcgccgcacccgaatcgccaaaaacttggaactggaacaagtgactgtcccaattggagttctgctggtgatctttgaatctcgtcctgactgtctaccccaggtggcagctttggctatcgcaagtggcaatggcttgttactcaaaggagggaaggaggctgcacacagcaaccggattctccacctcctgacccaggaggctctctcaatccatggagtcaaggaggccgtgcaactggtgaataccagagaagaagttgaagatctttgccgcctagacaaaatgatagatctgatcattccacgtggctcttcccagctggtcagagacatccagaaagctgctaaggggattccagtgatggggcacagcgaagggatctgtcacatgtatgtggattccgaggccagtgttgataaggtcaccaggctagtcagagactctaaatgtgaatatccagctgcctgtaatgctttggagactttgttaatccaccgggatctgctcaggacaccattatttgaccagatcattgatatgctgagagtggaacaggtaaaaattcatgcaggccccaaatttgcctcctatctgaccttcagcccctccgaagtgaagtcactccgaactgagtatggggacctggaattatgcattgaagtagtggacaacgttcaggatgccattgaccacatccacaagtatggcagctcccacacggatgtcatcgtcacagaggacgaaaacacagcggagttcttcctgcagcacgtagacagtgcctgtgtgttctggaatgccagcactcgcttttctgatggttaccgctttggactgggagctgaagtgggaatcagtacatcgagaatccacgcccggggaccagtaggacttgagggactgcttactactaagtggctgctgcgagggaaggaccacgtggtctcagatttctcagagcatggaagtttaaaatatcttcatgagaacctccctattcctcagagaaacaccaactgaaaagagccaggaaaacccgggaattttccaaaaggtcttcacgttaaacttgtcttatctcaggagagagcccgctcttgtctcccagttcctggtagggtctgcctgttggaaagtgtacctggatgcttctgggctccgtttggcaatagcaatcttggctgatgtgcacagtctggctcccagctcaccctttttttttaaagtaagaaaatagttgctaccgatagggactttgccaagtccaattatcttctaggattgaaaggtgcattttccccataaaaaaggcgaggaaaacccatggctgctttgtgtcacctcagtgacttacagtcccccttcgcatttagttggtactagagccagtcatccttaacaaatcttttcgcgttttatttctttcacatgtagtcatcttcaaaaaggaaagatttggaattttagaaaaggggcaactcttctttttagcattctcatcagaaagtcacaaaaatcgatggaatcatttccactgggaagattgaccttttgtatttatttgtggggtaaattaataagcattccagatgcttgcagcttcctgcatccaggagatgctgtgtcccccgtgatgcagctggaacccaagctgcagcaggagatgcaagtttcaggatgttccccactgagctggaggaatatctacagcagtgatgcttgaaatttttgtatgaattattttgtcgtcctacccttttcctccaaaacaaaaattagaggattattttaatactttggattcttcccccttttttgagaaataaagttttttatg

SEQ ID NO: 83 - DNA, 1022 bp, Homo sapiens
cacccccacctgccagagccttgatccctccctaggccctgcctaaccttgagttggccccaatccctcttggctgcagaagtccctttcacccccaatgagaggaggggcaggaccagatcttttgagagctgagggttgagggcattgagcaacacacagatttgtcgcctctgtccccgaagacacctgcaccctccatgcggagccaagatggggaatggaactgaggaagattataactttgtcttcaaggtggtgctgatcggcgaatcaggtgtggggaagaccaatctactctcccgattcacgcgcaatgagttcagccacgacagccgcaccaccatcggggttgagttctccacccgcactgtgatgttgggcaccgctgctgtcaaggctcagatctgggacacagctggcctggagcggtaccgagccatcacctcggcgtactatcgtggtgcagtgggggccctcctggtgtttgacctaaccaagcaccagacctatgctgtggtggagcgatggctgaaggagctctatgaccatgctgaagccacgatcgtcgtcatgctcgtgggtaacaaaagtgacctcagccaggcccgggaagtgcccactgaggaggcccgaatgttcgctgaaaacaatggactgctcttcctggagacctcagccctggactctaccaatgttgagctagcctttgagactgtcctgaaagaaatctttgcgaaggtgtccaagcagagacagaacagcatccggaccaatgccatcactctgggcagtgccaggctggacaggagcctggcctggggagaagagggcctgttgcatcagcctctgaccttggccagcaccacctgcccccactggctttttgtgccccttgtccccacttcagccccaggacctttccttgccctttggttccagatatcagactgttccctgttcacagcaccctcagggtcttaaggtcttcatgccctatcacaaatacctcttttatctgt

SEQ ID NO: 84 - DNA, 3413 bp, Homo sapiens
gtaactccaggacgagaccggagcgacccgcgcagcgagcataggcggcgaagctgcgcccggcgcccgagaccggcagctgcgtggggcgggggctgcgcccgagcccgatctgccggctccgagcagtggtctcggaaagagggtcgtggtcccgcacggatgcgcttgttgggagaaaccttggagattcacggcaaggcgtaaagcctggggcttccaacgatactctgggcagggatggaagcctagatgcctcaccgcaaggagcggccgagcgggtcctcgcttcacacacacggcagcaccggcaccgcggagggaggaaacatgtcccggctgtctctcacccggtcgcctgtgtctcccctggctgcccagggcatccccctgccagcccagctcaccaagtccaatgcacctgtgcacatcgatgtgggcagccacatgtacaccagcagcctggccacgctcaccaagtaccctgactccaggataagccgcctcttcaatggcactgaacccatcgtcctggacagtttgaagcaacattatttcattgaccgggatggggagattttccgctacgtcctgagcttcctgcggacgtccaagctgctgcttccggatgactttaaggacttcagtctgctgtacgaggaggcgcgctactatcagctccagcccatggtgcgcgagctggagcgctggcagcaggagcaggagcagcggcgccgcagccgggcctgtgactgcctggtggtgcgcgtcacgcccgacttgggcgagcggatcgcactcagcggcgagaaggccctcatcgaggaggtcttccccgagaccggagacgtcatgtgcaactccgtcaacgccggctggaaccaggaccccacgcacgtcatccgcttcccgctcaatggctactgccggctcaactcggtacaggatgttctataaaaatggcccagagtattttcaacaaagcgtgcttcatttgacacccagagtctgactttggattcgaactaaacccaggcaacaggcgaggcaggacagaggctgagtggaaaggtggtctggagccccttccctctccctgctgaccttggagtcgcaggcacccaccagctgccaagagaatccctggaccggctcttcctggatgggtccaagaattggacagctcagatggagtgagggcctattttccaacagctcttcgcagacccaagagcttggcacatttccgggttagggtggaatgggctttgcagggaagagggccccctgtgcacgcattccacagcctgtcggtcagaacttgctagttgcaggagacgggtgttacacgcagtcatcagacctcaccctcacagaggcacaaacccacatagttgtggacgcctgcagagactcaaatattgagaggacttctcctttttctctccctccagagctcccacgagctgatgcacccccaggcttcaaaccacctggaatgcacagctcagggaagctggtggatgcctagaggctgaaggacagggaactctccattattggggcaggactcagggaggacacttggggccatgtgtctggagagagggcataggttacaccctacagaataaagaagggacccaaagcctctttttgcctcccggaatcaaggccctgagggcagcaggatggtggcctgggtggggtcgtccaactaggtttgctaacctgaggggtcactgggcctggccacttctgtccctctggtggtggaacccagcacgtggttctgtagggacctttgtcagtgagcaagactgagatcgtcacaggagaaggtgcccttgctggctgccccagcaggcacccacctccctgccaggccaagccaggtgtcctcttgcagcttggccttgatgacctctgtttcttcctgggcaggtcctggagcggctgttccagaggggtttcagcgtggctgcgtcctgtgggggcggtgtggactcctcccagttcagcgagtatgtgctttgccgggaggagcggcggccgcagcccacccccactgctgttcgaatcaagcaggaacccctggactaggccctgcttcagtgcccacctgggcccccccagggacctggaaacagtgctggggagttctgcctgtgtatacttggccgtgggcatgagaccgagggtgaggctggagggtccaaagctggcccagcgagcaccagggtcccaggtgtcatggcaacagaacgtgggatgctggaggcatgcctgcagaaggactgttgatgcgacccaaagatacagcggtgggatctctgctgccagctctcccagcccctcagcttcgcagcctggcgcagcatcctctgaggccccggggcctgttggggcggggttggaagagccgtctgcagctacttcagaggagctgtttatccctctccacgcggggcagactctggcgggtctcctagcgtccgagagatggcttatttttctacagtatttaaaatggatgcagccctaactgcaaaagtcagagaggctgacaaggaccaatgcttctttatctggtgctcagttctcagtcagacgtgcagcatggctgcagggtggaccagctgcctggcattcaggcccagatgcctgcagggctggggctctcgggacagatgcagggatgtgtgctgcagggctgctgggaggagagtggtgggggcctgagggctgagtgattctgtaaccacctgagaccttcacgtttgctgccgttgggggctcaggctgcactccccgggtcacctgacctgctgcccaggggcttccagtcctgtctgtgtggactggcacctgggctgctggagaagtctcctcccgttcggaccagcctcagggctgcacgttacctcaggaatgggccccaccatgaaggggcccatctgtcagcagcgtcttctaggtccccagctcagggagccatccccagctccagttttctcatgcgaatatgcacagttttaattcacgttgttacactagcctgccgatgagacccagacacaggcagacctggcgctcttgacccctgattccagtgaggactggccctgaggagtccttgcagacctgctgcctgccccacgacaggcccaaagatggaccccccctggccttgtgacagctccccaagtgttctccggtggagaaactgcagaggactggtgggcggggctccccagccatcaccatcctgtgtacaatggctgtagacttgtatatggctcctttaatattgtaaagatgctgatgtacaattgtcgtgcatttgtgtgaacacattgcgttcccagtccatgccataaatgatgctctcaagcaaaaaaaaaaaaaaaaaa

SEQ ID NO: 85 - DNA, 1057 bp, Homo sapiens
gtctcagcggctgccaacagatcatgagccatcagctcctctggggccagctataggacaacagaactctcaccaaaggaccagacacagtgagcaccatgggacagtgtcggtcagccaacgcagaggatgctcaggaattcagtgatgtggagagggccattgagaccctcatcaagaactttcaccagtactccgtggagggtgggaaggagacgctgaccccttctgagctacgggacctggtcacccagcagctgccccatctcatgccgagcaactgtggcctggaagagaaaattgccaacctgggcagctgcaatgactctaaactggagttcaggagtttctgggagctgattggagaagcggccaagagtgtgaagctggagaggcctgtccgggggcactgagaactccctctggaattcttggggggtgttggggagagactgtgggcctggagataaaacttgtctcctctaccaccaccctgtaccctagcctgcacctgtcctcatctctgcaaagttcagcttccttccccaggtctctgtgcactctgtcttggatgctctggggagctcatgggtggaggagtctccaccagagggaggctcaggggactggttgggccagggatgaatatttgagggataaaaattgtgtaagagccaaagaattggtagtagggggagaacagagaggagctgggctatgggaaatgatttgaataatggagctgggaatatggctggatatctggtactaaaaaagggtctttaagaacctacttcctaatctcttccccaatccaaaccatagctgtctgtccagtgctctcttcctgcctccagctctgccccaggctcctcctagactctgtccctgggctagggcaggggaggagggagagcagggttgggggagaggctgaggagagtgtgacatgtggggagaggaccagctgggtgcttgggcattgacagaatgatggttgttttgtatcatttgattaataaaaaaaaatgaaaaaagtgaaaaaaaaaaaaaaaaa

SEQ ID NO: 86 - DNA, 2221 bp, Homo sapiens
agagcaaggaagggcaggggacctgggaaggaagttctggaaggcagtggggtttgagattggacccagggtcaagatagaacatgaaggtgggatgaggacatgaacagaacatggccaagaaggatctgggggagcagccaggacgaggcggagctgatccgagaggacatccagggggctctgcacaattaccgctcgggccgcggggagcgcagggcggcggcgctcagggccacgcaggaggagttgcagcgcgaccgctcgcccgccgctgagaccccgcccctgcagcgccgcccgtcagtccgcgcagtgatcagcaccgtagagcggggcgcgggccgcggacgaccccaggcgaagcccattcccgaggcagaggaggcgcagaggcctgagccggtggggacctcgagcaacgctgactcggcctccccggacctgggtccccggggtcctgacctggcggttctgcaggcggagcgggaagtggacatcctgaaccacgtgttcgacgacgtagagagctttgtatcgaggctgcagaagtcggcggaggcggccagggtgctggagcaccgggaacgcggccgcaggagccggcgccgggcggctggggagggcttgctgacgctgcgggccaagccgccctcggaggccgagtacaccgacgtgctgcagaagatcaagtacgccttcagcctgctggcccggctgcgcggcaacatcgccgacccctcctctccggagctgttgcacttccttttcgggcctctgcagatgattgtgaacacgtcgggggggccggagttcgcgagcagtgtgcggcggccgcatctgacatcggatgccgtggcgctgctgcgggacaacgtcactccacgtgaaaacgagctctggacctcgctgggggactcgtggacccgccccgggctggagctgtccccggaggagggacccccatacagacccgagttcttcagcggctgggagccgccggtcactgacccgcagagccgcgcctgggaggacccagttgagaaacagctacagcacgagcggaggcgccggcagcaaagcgccccccaggtcgctgtcaatggtcaccgagacttggagccagaatctgagcctcagctggagtcagagacagcaggaaaatgggtcctgtgtaattatgacttccaggcccgcaacagcagtgagctgtcggtcaagcagcgggacgtactggaggtcctggatgacagtcgtaagtggtggaaggttcgggacccagcggggcaggagggatatgtgccctacaacatcctgacaccctaccccggaccccggctgcaccacagccaaagccctgcccgcagcctgaacagcactcctcctccaccaccagccccagccccggccccacctccagctctggctcggccccgctgggacaggccccgctgggacagctgcgatagcctcaacggcttggaccccagcgagaaggagaaattctcccagatgctcatcgtcaacgaggaactgcaggcgcgcctggcccagggccgctcgggaccgagccgcgcagtcccagggccccgcgccccggaaccgcagctcagcccgggctcggacgcctccgaggtccgcgcctggctgcaggccaagggctttagctccgggaccgtggacgcgctgggtgtgctgaccggggcgcagcttttctcgctgcagagggaggagctgcgggcggtgagccccgaggagggggcacgtgtgtacagccaggtcaccgtgcagcgctcgctgctggaggacaaagagaaagtgtcagagctggaggcagtgatggagaagcaaaagaagaaggtggaaggcgaggtggaaatggaggtcatttgacctgccaggcgcccttcgcaaagagtgacgaggccccgtgggagaacggactcctcagactctccccaatagcggaagtcgatcttctgaaggatggccaatctgctccggccctggtcttcccccatcccggtggacagacttaacgatccttgctgcagtccctccggagaggatctggactggctgggagtggggagggcgtggagacagtctacggaaagcgctagcagacccccgagagggtgcagtggagccctgagcattgtaatatgcggcccagcctataaacagcctccgtgcttagcaaaaaaaaaaaaaaaaaaaa

SEQ ID NO: 87 - DNA, 2085 bp, Homo sapiens
ggctgcagttacagagtgctgccatcaccaagtatgtggcggacgtcctgccggggaagaatcaaagagcagagagcatggccagtgcagcgagggaactggttatccagcggttgagtctggtgaggagtctttgcgagagcgaggagcagcggttactggaacaggtgcatggcgaagaggagcgggcccaccagagcatcctgacacagcgggtgcactgggccgaggcgctgcagaaacttgacaccatccgcactggcctggtgggcatgcttactcacctggatgacctccagctgattcagaaggagcaagagattttcgagaggaccgaagaagcagagggcattttggatccccaggagtcggaaatgttaaactttaatgagaagtgcactcggagcccactactgacccaactctgggcaacggcggttcttgggtctctctcaggcacagaggacatacggatcgatgagaggacagtcagccccttcctgcaattgtcagatgatcgaaagaccctgaccttcagcaccaagaagtcaaaggcctgtgcagatggcccggagcgcttcgaccactggcccaatgccctggctgccacctccttccagaatgggctccatgcctggatggtgaatgtccagaacagttgtgcctataaggtgggcgtggcttcaggccacctgccccgcaagggttctggcagtgactgccgtctgggccacaatgccttctcctgggtcttctctcgctatgatcaggagtttcgtttctcacacaatgggcagcacgagcccctggggctgctgcggggcccagcccagctgggtgtagtgctggacttgcaggttcaggagctgctcttctatgagccagcctccggcatagtgctctgtgcccatcatgtgtccttcccggggcccctcttcccagtctttgctgtggccgatcagaccatttctatcgtccgctgacctctggccacaggaagccaggtccaccgcccaccaccctttcaggccatgtttctactcagtgtgcttttcccaaatgatgtgtgtggtgtttctaagagaaacagggcccataaccagtgggcagctttaggagggatggggatctgtttcagatctaggcataacctgtaaatcacaggtgtccaaacttttggcttccctgggccacatttgaagaagaattttcttgggccacataaaatacactaacgatagctgatgagctaaaaaaaaaaaaaaaagtctgtgtataatttttgtgatatctgccaccacagataagcaaaaaagtccttgcattcaaagggttggagattgctgctttgagtgctgggtacctgtggggaacctactactccctgggccttagtctcccaaatccaccatgcatctgcccctctgagggtgtcttcactttgtctctggcatctagcatggtgcctggtgcatagtgagcatgcaataaatatttggcaggtgagtggatggatagatggataggtgaatgtaggtggacaggtgactgggtggatgttgtggtctctggagaagcactgccattcagcctcctgctccagctgttcacatgcagaaatgctctcttcacaggcagagaagcctgtggctaaagtttccacatcccattaactcagtgcttttgtctttttcatgacatggcacatagagaaaatatttttttctagcacacaagagcaacctgaaaggctgctcctggctaggggactctgtcccgggggaccgtgtcctcccccatgtcctgcctaggccctcagaggaccaggggatcatgtctccaggtaacccgactgtagcccctgctggctgagctccagcctgtgcccactgataatagcagggacggcctttctcttagagcagctgataagtttccctacctgatggccccctctgacataaactgcacacctggggtgatggcttaaagccagaaagagctgagggagttaagagggccaaccttagggcacgtgggcattattaaaggtcttaaaagcattaaaaaaaaaaaaaaaaaaaa

SEQ ID NO: 88 - DNA, 2730 bp, Homo sapiens
agaatgcctatgagacacaggaagaaggcagcagacaagaatcttccctgccgtcctttagtatgtgcagtactggacctgatggtagagtttattgtaacacacatgatgaaggagtttcctatggatctctatatacgctgcatccaggtagtacacaaactgctctgctaccagaagaagtgtcgggtacgcctgcattacacctggcgggagctctggtcagccttgataaatttgctgaagttccttatgtcaaatgagactgtacttttggccaaacacaacatttttacattagcccttatgattgtgaacctatttaatatgtttatcacatatggcgacacatttctgccaacccccagcagctatgatgaactttactatgagattatccgcatgcaccagagctttgacaacctctactccatggtcctgaggctttctaccaatgcaggccagtggaaggaagcagctagcaaggtgacccatgcattggttaatatcagagccatcatcaaccactttaaccccaaaattgagtcctacgctgctgtgaatcacatatcccaactgtcagaggagcaggtgctggaggtggtgagagccaactatgacacgctcacgctgaagctgcaggatggcctggaccagtatgagcgctactcagagcagcacaaggaagctgccttcttcaaagagctggttcgatccattagcaccaacgtccggagaaacctggtcttccacacactcagccaagaagtcctgctcaaggagttctccactatctcctgaggccacgcctacctgagcagcctctgactgcccttacccatgaggatcatgggctggagggggagcgaggggagagggggctgcccccgaggttggagagaaacacagataccaagttctcttggtgaagaccgcacttcaatggagcttgggcagcaggggcaggagggtcaagccagggataatcttatttggggaggaatgggtgggcacagtggggagaggcctccaggaatgtggggacttccagagtgggctccctaaacagcccctcacatttccaatcttgaggttacaagctgtagctactgactaattttcgggagctggtgaggcaagcctcagggtaatgccagcaccctgaaagtcagtggctctgctcggcttctgaaaacagatcaactctcagatatagctggagctacatcctgcttcctttgggcctggggctgtgcttggcttgaaatctgtgtcccctgcctgcactggcactttgtccagtcatcgggacctttggctcagatttagggtaagataggaatagggtacctttttccttttttttctgagacggagtctcactctgtcgcccaggctggaatgcagtggcgtgatctcggctttactgcagcctccgcttcctgggttcaagcgattctcctgcctcagcctcccgagtagctgggactacaggagcgtgtgccacgcccggctaattttttgtatttttagtagagatggagtttcaccatgttacccaggatggtctcaatatcctgagttcatgatccacccaccttggcctcccaaagtgctgggattacaggcgtgagccaccacacccagccagttttcctattttctgaattcagaattgacttctctgggaaaactggagatgagaatctgcccagtgctctgctgtccagtcaccgccttttgaattttagttttggcaccaggagtaccgttagctttccccttcttctggcccatttgactcatcagcacaatagggtcaccaccttaacttttaatttctaatctgctttactgtctttagggtgtgtatgaaataaacattgacaggctttctggagccctcaaggtgcctactttgctggttccctttccagcagctcccccacctcccttagccccccctcctctggcagcctctcctgcctctgctgagctcccctccacgtgttccacccccttaccctgctgttgtttacatccaacctgcctgagaatttcctctggggaggaatctattcctgtcatggtctagtgcctgggagggagagaacttcctgggggtagggtgccctccatctgaaacaggccaggtgagcatcatgcataaggcctccattctgtccgctcagattctgggtggggccacaggcaaatctcctgacttatggggagttggcttgtggttcctcccttggatagcctccatggaaccactataggctttcccaacagctgcctctgaaatagctgctgcttcgagatcctccctttttaaagcactttctaaagccctcaggatggcgggagcaaacagcactggtatattctaggagtaagtgcaggaattcagcagtgagagcatgtctgggaccacctggactgccatccatttaacctcaaatctctttgggatactcgccctccctgggaaccagagttctggctctaacattgagcagctatgcactagttccagagaagccactaacaggctgccatgtgtagatgtaggttcttaagagatcacaggctgggtcatctgatcactggatggatagctcagcctggggcatttagtgttttccctggtgataaatccccaaggcagctggatttggagctggtggcaagttgaaattattaaaaattgatttgtgtgggactgtc

SEQ ID NO: 89 - DNA, 2079 bp, Homo sapiens
gagaggcagcagcttgttcagcggacaaggatgctgggcgtgagggaccaaggcctgccctgcactcgggcctcctccagccagtgctgaccagggacttctgacctgctggccagccaggacctgtgtggggaggccctcctgctgccttggggtgacaatctcagctccaggctacagggagaccgggaggatcacagagccagcatggtacaggatcctgacagtgatcaacctctgaacagcctcgatgtcaaacccctgcgcaaaccccgtatccccatggagaccttcagaaagtgtggggatccccatcatcatagcactactgagcctggcgagtatcatcattgtggttgtcctcatcaaggtgattctggataaatactacttcctctgcgggcagcctctccacttcatcccgaggaagcagctgtgtgacggagagctggactgtcccttgggggaggacgaggagcactgtgtcaagagcttccccgaagggcctgcagtggcagtccgcctctccaaggaccgatccacactgcaggtgctggactcggccacagggaactggttctctgcctgtttcgacaacttcacagaagctctcgctgagacagcctgtaggcagatgggctacagcagcaaacccactttcagagctgtggagattggcccagaccaggatctggatgttgttgaaatcacagaaaacagccaggagcttcgcatgcggaactcaagtgggccctgtctctcaggctccctggtctccctgcactgtcttgcctgtgggaagagcctgaagaccccccgtgtggtgggtggggaggaggcctctgtggattcttggccttggcaggtcagcatccagtacgacaaacagcacgtctgtggagggagcatcctggacccccactgggtcctcacggcagcccactgcttcaggaaacataccgatgtgttcaactggaaggtgcgggcaggctcagacaaactgggcagcttcccatccctggctgtggccaagatcatcatcattgaattcaaccccatgtaccccaaagacaatgacatcgccctcatgaagctgcagttcccactcactttctcaggcacagtcaggcccatctgtctgcccttctttgatgaggagctcactccagccaccccactctggatcattggatggggctttacgaagcagaatggagggaagatgtctgacatactgctgcaggcgtcagtccaggtcattgacagcacacggtgcaatgcagacgatgcgtaccagggggaagtcaccgagaagatgatgtgtgcaggcatcccggaagggggtgtggacacctgccagggtgacagtggtgggcccctgatgtaccaatctgaccagtggcatgtggtgggcatcgttagctggggctatggctgcgggggcccgagcaccccaggagtatacaccaaggtctcagcctatctcaactggatctacaatgtctggaaggctgagctgtaatgctgctgcccctttgcagtgctgggagccgcttccttcctgccctgcccacctggggatcccccaaagtcagacacagagcaagagtccccttgggtacacccctctgcccacagcctcagcatttcttggagcagcaaagggcctcaattcctgtaagagaccctcgcagcccagaggcgcccagaggaagtcagcagccctagctcggccacacttggtgctcccagcatcccagggagagacacagcccactgaacaaggtctcaggggtattgctaagccaagaaggaactttcccacactactgaatggaagcaggctgtcttgtaaaagcccagatcactgtgggctggagaggagaaggaaagggtctgcgccagccctgtccgtcttcacccatccccaagcctactagagcaagaaaccagttgtaatataaaatgcactgccctactgttggtatgactaccgttacctactgttgtcattgttattacagctatggccactattattaaagagctgtgtaacatcaaaaaaaaaaaaaaaaaaaa

SEQ ID NO: 90 - DNA, 2378 bp, Homo sapiens
aattccctccgccgcggtcgctgagcgagtgcggcgggaatgcggaaccggcgcgcgggctgaggccgcccgggatggcgcaggggcggcggcggcgggcggcctgcgcggggccctagcgagccgggctgacgctcccggccccggccccggcatcggcatcgcgggcgcatcgcggccatggccaaggagcggcgcagggcggtcctggagctgctgcagcggccggggaacgcgcgctgcgcggactgcggcgccccggatcccgactgggcctcctacactctgggcgtcttcatctgcctgagctgctcgggaatccaccggaatatcccccaggtcagcaaggtgaagtccgtccgcctggacgcctgggaggaggcccaagtggagttcatggcctcccacgggaacgacgccgcgagagccaggtttgagtccaaagtaccctccttctactaccggcccacgccctccgactgccagctccttcgagagcagtggatccgggccaagtacgagcgacaggagttcatctacccggagaagcaggagccctactcggcagggtaccgtgagggttttctctggaagcgtggccgggacaacgggcagtttttgagccggaagtttgtgctgacagaacgagagggtgctctgaagtatttcaacagaaatgatgccaaggagcccaaggccgtgatgaagatcgagcacctgaatgccaccttccagccggccaagatcggccacccccacggcctgcaggtcacctacctgaaggacaacagcacccgtaacatcttcatctaccatgaggacgggaaggagattgtggactggttcaatgcactccgagctgctcgcttccactacctgcaggtggcattcccaggggccagcgacgcagatctggtgccaaagctctccaggaactacctgaaggaaggctacatggagaagacggggcccaagcaaacggaaggcttccggaagcgctggttcaccatggatgaccgcaggctcatgtacttcaaagaccccctggacgccttcgcccgaggggaagtcttcattggcagcaaggagagtggctacacggtgctgcatgggttcccgccgtccacccagggccaccactggccacatggcatcaccatcgtcacgcccgaccgcaagtttctgtttgcctgcgagacggagtccgaccagagggagtgggtggcggccttccagaaggcggtggacaggcccatgctgccccaggagtacgcagtggaggcgcacttcaagcataaaccttagcgagtgcggctggaggaccacggacattggactcactgtggctggacggaggggacccgtggatgggggggctctggcgtcctgaggccacctggccccacctgctcctcagggcagcccggcgcggccaggtagggcccgagcttcagcttccaggatgcttctctggaacctcaaggcaggcagcccaggccctgggcctgatctctaaccccgtcatgctgctgctgaccacacccagccaacctgcccctccctgacccggggccccctttcctccagggcccagtctggctcccgagctcagacacagcccccaggagccgcccaccacggctgtgggaacttccaggcctcagcgcagagccctgcttggggccagcacggtgggcagctgccggccgctggggactgggccctgctcgcatgccgccccgccctccccccacctccacgactatttattgagcgcctgttgtgtgtcacggggctatgagggccgtggggtgtttgggtggattatccacacaggtcccggcccctgcccgggctggagttgccacagcctgtgctcctggtcctcacctggaggggccagcaggctgccgtcccaccacacgtggcctctgcgcccagcacggtgctcgccgacagtggtgtctgaacccttggggacgagggcctgggccgcggtgaggccaccagaggcaggagtggccctgggggtcccgggcactgtcgcgcttgctgcaggcggcccagccgtgtatttatttttcacctatctccttcctgtcaaggcaggccgggctccagggctccccttgcgtggggcatgtaggtgggggaggcgtctgcaggtcacctggggggcccagccctctcccagccttgcctggctgagctgtgttccaggggagccctggacaagccctcataggcagggagggggtttccgaggccaggcatccgccgccccgtgtcgcatcctggaataaaatgtggctctggcatggttaaaaaaaaaaaaaaaaaaaaaaaaaaaaaaaaaaaaaaaaaaaaaaaaaaaaaaa

SEQ ID NO: 91 - DNA, 4793 bp, Homo sapiens
attggatcaaacatgtcacaagagtcggacaataataaaagactagtggccttagtgcccatgcccagtgaccctccattcaatacccgaagagcctacaccagtgaggatgaagcctggaagtcatacttggagaatcccctgacagcagccaccaaggccatgatgatcattaatggtgatgaggacagtgctgctgccctcggcctgctctatgactactacaaggttcctcgagacaagaggctgctgtctgtaagcaaagcaagtgacagccaagaagaccaggagaaaagaaactgccttggcaccagtgaagcccagagtaatttgagtggaggagaaaaccgagtgcaagtcctaaagactgttccagtgaacctttccctaaatcaagatcacctggagaattccaagcgggaacagtacagcatcagcttccccgagagctctgccatcatcccggtgtcgggaatcacggtggtgaaagctgaagatttcacaccagttttcatggccccacctgtgcactatccccggggagatggggaagagcaacgagtggttatctttgaacagactcagtatgacgtgccctcgctggccacccacagcgcctatctcaaagacgaccagcgcagcactccggacagcacatacagcgagagcttcaaggacgcagccacagagaaatttcggagtgcttcagttggggctgaggagtacatgtatgatcagacatcaagtggcacatttcagtacaccctggaagccaccaaatctctccgtcagaagcagggggagggccccatgacctacctcaacaaaggacagttctatgccataacactcagcgagaccggagacaacaaatgcttccgacaccccatcagcaaagtcaggagtgtggtgatggtggtcttcagtgaagacaaaaacagagatgaacagctcaaatactggaaatactggcactctcggcagcatacggcgaagcagagggtccttgacattgccgattacaaggagagctttaatacgattggaaacattgaagagattgcatataatgctgtttcctttacctgggacgtgaatgaagaggcgaagattttcatcaccgtgaattgcttgagcacagatttctcctcccaaaaaggggtgaaaggacttcctttgatgattcagattgacacatacagttataacaatcgtagcaataaacccattcatagagcttattgccagatcaaggtcttctgtgacaaaggagcagaaagaaaaatccgagatgaagagcagaagcagaacaggaagaacgggaaaggccaggcctcccaaactcaatgcaacagctcctctgatgggaagttggctgccatacctttacagaagaagagtgacatcacctacttcaaaaccatgcctgatctccactcacagccagttctcttcatacctgatgttcactttgcaaacctgcagaggaccggacaggtgtattacaacacggatgatgaacgagaaggtggcagtgtccttgttaaacggatgttccggcccatggaagaggagtttggtccggtgccttcaaagcagatgaaagaagaagggacaaagcgagtgctcttgtacgtgaggaaggagactgacgatgtgttcgatgcattgatgttgaagtctcccacagtgatgggcctgatggaagcgatatctgagaaatatgggctgcccgtggagaagatagcaaagctttacaagaaaagcaaaaaaggcatcttggtgaacatggatgacaacatcatcgagcactactcgaacgaggacaccttcatcctcaacatggagagcatggtggagggcttcaaggtcacgctcatggaaatctagccctgggtttggcatccgctttggctggagctctcagtgcgttcctccctgagagagacagaagccccagccccagaacctggagacccatctcccccatctcacaactgctgttacaagaccgtgctggggagtggggcaagggacaggccccacagtcggtgtgcttggcccatccactggcacctaccacggagccgaagcctgagcccctcaggaaggtgccttaggcctgttggattcctatttattgcccaccttttcctggagcccaggtccaggcccgccaggactctgcaggtcactgctagctccagatgagaccgtccagcgttcccccttcaagagaaacactcatcccgaacagcctaaaaaattcccatcccttctttctcacccctccatatctatatctcccgagtggctggacaaaatgagctacgtctgggtgcagtagttataggtggggcaagaggtggatgcccactttctggtcagacacctttaggttgctctggggaaggctgtcttgctaaatacctccagggttcccagcaagtggccaccaggccttgtacaggaagacattcagtcaccgtgtaattagtaacacagaaagtctgcctgtctgcattgtacatagtgtttataatattgtaataatatattttacctgtggtatgtgggcatgtttactgccactggcctagaggagacacagacctggagaccgttttaatgggggtttttgcctctgtgcctgttcaagagacttgcagggctaggtagagggcctttgggatgttaaggtgactgcagctgatgccaagatggactctgcaatgggcatacctgggggctcgttccctgtccccagaggaagccccctctccttctccatgggcatgactctccttcgaggccaccacgtttatctcacaatgatgtgttttgcctgactttccctttgcgctgtctcgtgggaaaggtcattctgtctgagaccccagctccttctccagctttggctgcgggcatggcctgagctttctggagagcctctgcagggggtttgccatcagggccctgtggctgggtctgctgcagagctccttggctatcaggagaatcctggacactgtactgtgcctcccagtttacaaacacgcccttcatctcaagtggccctttaaaaggcctgctgccatgtgagagctgtgaacagctcagctctgagtcggcagactggggcttcctcctgggccaccagatggaaagggggtattgtttgcctcactcctggatgctgcgttttaaggaagtgagtgagaaagaatgtgccaagatacctggctcctgtgaaaccagcctcaggagggaaactgggagagagaagctgtggtctcctgctacatgccctgggagctggaagagaaaaacactcccctaaacaatcgcaaaatgatgaaccatcatgggccactgttctctttgaggggacaggtttaggggtttgcgttcgcccttgtgggctgaagcactagctttttggtagctagacacatcctgcacccaaaggttctctacaaaggcccagatttgtttgtaaagcactttgactcttacctggaggcccgctctctaagggcttcctgcgctcccacctcatctgtccctgagatgcagagcaggatggagggtctgcttctagctcagctgtttctccttgaggttgcggaggaattgaattgaatgggacagagggcaggtgctgtggccaagaagatctccgagcagcagtgacggggcaccttgctgtgtgtcctctgggcatgttaacccttctgtggggccaaaggtttgcatcgtggatccagctgtgctccagtctgtcccctcctcctccactctgactgccacgccccggaccagcagcttggggaccctccagggtactaatggggctctgttctgagatggacaaattcagtgttggaaatacatgttgtactatgcacttcccatgctcctagggttaggaatagtttcaaacatgattggcagacataacaacggcaaatactcggactggggcataggactccagagtaggaaaaagacaaaagatttggcagcctgacacaggcaacctacccctctctctccagcctctttatgaaactgtttgtttgccagtcctgccctaaggcagaagatgaattgaagatgctgtgcatgtttcctaagtccttgagcaatcatggtggtgacaattgccacaagggatatgaggccagtgccaccagagggtggtgccaagtgccacatcccttccgatccattcccctctgtatcctcggagcaccccagtttgcctttgatgtgtccgctgtgtatgttagctgaactttgatgagcaaaatttcctgagcgaaacactccaaagagataggaaaacttgccgcctcttcttttttgtcccttaatcaaactcaaataagcttaaaaaaaatccatggaagatcatggacatgtgaaatgagcatttttttcttttctttttttttttttttttttaacaaagtctgaactgaacagaacaagactttttcctcatacatctccaaattgtttaaacttactttatgagtgtttgtttagaagttcggaccaacagaaaaatgcagtcagatgtcatcttggaattggtttctaaaagagtaaggcatgtccctgcccagaaacttaggaagcatgaaataaatcaaatgtttattttccttcttatttaaaatcatgctaatgcaacagaaatagagggtttgtgccaaatgctatgaacggccctttcttaaagacaagcaagggagattgatatatgtacaatttgctctcatgttttt

SEQ ID NO: 92 - DNA, 1412 bp, Homo sapiens
ggctgcgcttccctggtcaggcacggcacgtctggccggccgccaggatgcaggccccgcacaaggagcacctgtacaagttgctggtgattggcgacctgggcgtggggaagaccagtatcatcaagcgctacgtgcaccagaacttctcctcgcactaccgggccacaatcggcgtggacttcgcgctcaaggtgctccactgggacccggagactgtggtgcgcctgcagctctgggatatcgcaggtcaagaaagatttggaaacatgacgagggtctattaccgagaagctatgggtgcatttattgtcttcgatgtcaccaggccagccacatttgaagcagtggcaaagtggaaaaatgatttggactccaagttaagtctccctaatggcaaaccggtttcagtggttttgttggccaacaaatgtgaccaggggaaggatgtgctcatgaacaatggcctcaagatggaccagttctgcaaggagcacggtttcgtaggatggtttgaaacatcagcaaaggaaaatataaacattgatgaagcctccagatgcctggtgaaacacatacttgcaaatgagtgtgacctaatggagtctattgagccggacgtcgtgaagccccatctcacatcaaccaaggttgccagctgctctggctgtgccaaatcctagtaggcacctttgctggtgtctggtaggaatgacctcattgttccacaaattgtgcctctatttttaccattttgggtaaacgtcaggatagatataccacatgtggcaagccaaagatctatgcctctgttttttcaatgagagagaaatagcaaatgttctttctatgctttcctcaccatcatcacagtgtttacaaacttttgaaaatatttagtctgttacaaacttctgtcatgtagctgaccaaaatcctgcagggccacagtcggcactgttatttgcttcttttaatcagcaaaggcctcaagtcttaaaataaaaggggagaagaacaaactagctgtcaagtcaaggactggctttcaccttgccctggtgtctttttccagatttcaatatattctctgatggcctgacaggcctattaagtagatgtgatattttcttccaagatgacctccattctcggcagacctaagagttgcctctgagttagctctttggaatcgtgaacacaggtgtgctatattgtccttgtcctaactgtcacttgccatggcctgaatgttggcttaactgaatattgtatgaaaagacatgcctccatatgtgcctttctgttagctctctttgactcaagctgtggggctcctctatacatgctatacatgtaatatatattatatatatttttgcaagtgaacaataaaacattaaaagataaaa

SEQ ID NO: 93 - DNA, 3279 bp, Homo sapiens
actgccggcctgcgcggtactcactgccggcctccgcggtacccactgccggcctccgcgctacccggccgcagcgcgcgagtcacatggaagctcctgaggagcccgcgccagtgcgcggaggcccggaggccacccttgaggtccgtgggtcgcgctgcttgcggctgtccgccttccgagaagagctgcgggcgctcttggtcctggctggccccgcgttcttggttcagctgatggtgttcctgatcagcttcataagctccgtgttctgtggccacctgggcaagctggagctggatgcagtcacgctggcaatcgcggttatcaatgtcactggtgtctcagtgggattcggcttatcttctgcctgtgacaccctcatctcccagacgtacgggagccagaacctgaagcacgtgggcgtgatcctgcagcggagtgcgctcgtcctgctcctctgctgcttcccctgctgggcgctctttctcaacacccagcacatcctgctgctcttcaggcaggacccagatgtgtccaggcttacccagacctatgtcacgatcttcattccagctcttcctgcaacctttctttatatgttacaagttaaatatttgctcaaccagggaattgtactgccccagatcgtaactggagttgcagccaaccttgtcaatgccctcgccaactatctgtttctccatcaactgcatcttggggtgataggctctgcactggcaaacttgatttcccagtacaccctggctctactcctctttctctacatcctcgggaaaaaactgcatcaagctacatggggaggctggtccctcgagtgcctgcaggactgggcctccttcctccgcctggccatccccagcatgctcatgctgtgcatggagtggtgggcctatgaggtcgggagcttcctcagtggcatcctcggcatggtggagctgggcgctcagtccatcgtgtatgaactggccatcattgtgtacatggtccctgcaggcttcagtgtggctgccagtgtccgggtaggaaacgctctgggtgctggagacatggagcaggcacggaagtcctctaccgtttccctgctgattacagtgctctttgctgtagccttcagtgtcctgctgttaagctgtaaggatcacgtggggtacatttttactaccgaccgagacatcattaatctggtggctcaggtggttccaatttatgctgtttcccacctctttgaagctcttgcttgcacgagtggtggtgttctgagggggagtggaaatcagaaggttggagccattgtgaataccattgggtactatgtggttggcctccccatcgggatcgcgctgatgtttgcaaccacacttggagtgatgggtctgtggtcagggatcatcatctgtacagtctttcaagctgtgtgttttctaggctttattattcagctaaattggaaaaaagcctgtcagcaggctcaggtacacgccaatttgaaagtaaacaacgtgcctcggagtgggaattctgctctccctcaggatccgcttcacccagggtgccctgaaaaccttgaaggaattttaacgaacgatgttggaaagacaggcgagcctcagtcagatcagcagatgcgccaagaagaacctttgccggaacatccacaggacggcgctaaattgtccaggaaacagctggtgctgcggcgagggcttctgctcctgggggtcttcttaatcttgctggtggggattttagtgagattctatgtcagaattcagtgacgtggtaggaaagaaagtcaggtcaagtgatgcttttgagcttacacacaattcacaggcccaccagtgacaatttactgtgagttaatgtcattcaggtgtgcccatggattttgagggctggaaatgcaaagacacatttttctataaaaagaaaaagcaactaaggttaaaagctatattgtggcccaagacactgtctgaaagatgacatgagtagtaattcaccactatctgaaccaagcaaggatcaatgtgctgactgcattggccaatggctttgatacttctgctatttttttagacacaaacccataaactaactgcttaagaattcatactgcttgaattatgtaaaatatattttacagtatatctttccttgggccttagattactattcactgggcaaatggtatttgtttttgttttaattttttttttaatagacggaagtcttgctctgtcatgcaggctggagtgcggtggtgcgatcatagctcactgcagcctcgaactcttgggcttcaagcaatcctcctgtgtcagccaccagagtagctgagactacaggggtatgccaccatgcccagctggcatttgttaatcttcatttgaggtctagatctaggcactgtggacactgaaaaacagttgggaaatctttcgagctgtggaaatccaaacaaagactgataattcctggtaggggtgtgtgcgtgacgtactgcagcctcaacctcctgggctcaagtgatcctcccacctcagcctcctgagtagctgagaccacaggcgtgtgccaccacgcctagctaattttttataccagggtctaccctttgtttcccaggctggtcttgaattcctgggatcaagcaatccttccaccttgccctcccaaagtgttgggattataggcatgagccaccacgactggccagaggacaaaattttaataaaggtcttagcttaagcagtaatcctacttcattaagccttcctggggtgcggtacacaccgttaattcagcaaccctcagtacatactaagtatgctcagtgctgtgaaagtggattacaccaaattaagtcattcttatcacacccaatcaaaagtcaagaagccagggataaaagcacctcaggcacataacattaatctagtaatgtaattctctgcacatccagctggtgaaactgcgtgctgtaagctgggaccagctttgtccataactgctgagagaacttgctgaagctctaggaataattttgcctgcccggttgctcaccagttgtagcttgccagctcccaacacccttcctggtgccaataaactttctcaaagagcaatactgacatttcttttgataaaacctccagccttctctgtgttgttccgacataccgaggaccaactggtctacatggatgccctgaacatgcaattctttcttccaaaataaaacattaaatagag

SEQ ID NO: 94 - DNA, 2399 bp, Homo sapiens
cccgggctcgcgggcagacggaggcgcctctctttccccgcccctcgcctcggccctttctcttcccagcacctcggctgttccccggcggcggcagcggcagcggcggcccacacagcagcgagaggcgagaggaggctgcctcgaggatgaagtgcaaacccaaccagacgcggacctacgaccccgaggggttcaagaagcgggcggcgtgcctgtgcttccggagcgaacgcgaggacgaggtcctgttagtgagtagcagccggtacccggaccgctggatcgtgccgggcgggggcatggagcccgaggaggagccgggcggtgcggcggtccgagaggtgtacgaagaagcgggagtcaaggggaagttaggccggctcctgggcgtcttcgaacagaaccaggatcgcaagcacagaacgtacgtgtatgtactgactgtcacggagctgctggaggattgggaagattcggttagcattgggaggaagcgagagtggttcaaagtcgaagatgccatcaaggttctccagtgccacaagcccgtgcacgccgaatatctggagaaactaaagctgggcggttccccaaccaatggaaactccatggccccatcctcgccagatagcgatccctaatgaacagcaaagatgttcagtattgtgctgaaagaaacattgatgtgaacccagtgatcagtggaattgtcaagtacaggtgagcacttctgtgttcccaagaagacagctcatctggtttcttcctgcatcttgggacactccttccctgtctataccactgactcttgctctggttgttgtactcttatacgtgaatagactcttaattcagcacctatagccttttgttgtgcttttttgatgtgtctgccttcattagactatgatgtctttgagagcaaagactatttttccttactctttgcatattctgcatctgagacactacttgaaatatggttggcatcactgaaggttctttgattcaattaatattttgtaatcaccgtgtggcaaaacattccccttccaatctggtgctagtagagtatatgctatctaggcaccatgtgtgtggcttttgtgtatcaggtgtttcagaaatatttcaagacagttgtaagatgtttgaggacaagaattattactcctatttctatgtcataccacacagtagctgcacagttttaagattatgccatcacctagggtaatgttttgtagaatcagtccttcgtgtaacaactctagtgtttttgtactgttgatgatttgcttaaattttattcaaaaactatcacttgctataaaggtaattgtaaaaataaatacagtggacgcaaaataatgttgtgagtttttataaaaataaattttaaaatgatatataagacatttttttgcaatgcctgccctaaccacttcttacatgtcatcttaacatctctttgaggaaacactgtttcctcattttacagatttaacatactgtattatttgatgccagagccaacaggctatatcataggcagtttccaaacttaattatgccatttagtttgtctagatttcttttgcctctctcactgatccatttggctgtagttttcatcccttttccagtacacacagctagctcctcatcctacctggtttctgcatatgagaatgcagagggctgagagagggcaaaattgttgtcatttagaaaaggcatttaggaaagaggctgctattagaggggaacacaaagtgaaggtttttttaaaaaagaggacttgcatcagctgcctccagaacaattttaagaaaataacaaagatgtttagaagaaatcttacggagtttgccatgggatgtgtgatatcagcagtcttcagctccttacaaattaccaaaagtggttctaatatgctagtttgtttgattttttcttttatattataaagcaattgcatcgataaaagcttggactccattttagtgtgacactcttcctcatgataccagtgaaatgtattgattgtgtccccagttgttacataatttgaaataaaaatataacttcttgatttattgttttttaagatgtgatatggtactgtggttatgttgttttaaaaaatgattatcttttagagaagtatactgaaaaatgtacaggtgaaatgatatgttactggtattcgcttcaaaatcatctgagtgtggggtaattgagtacatagatgaaacaagattggccataaattggtaattgctgaagctgtgtgatggatgtttgagagttcattatactattctctatacttttgtatatgtttgaaattttccataataaaaattgaaaaaagtaaaaaaaaaaaaaaaaaa

SEQ ID NO: 95 - DNA, 5490 bp, Homo sapiens
gtgggggccaggcagcacagatgaagcatttacctatctaggtaagtcaggaggagctcaaaaggagaagaaaacagtaggaggcaggggaagcagcctctgtctccatctctgccctttgaaacaaaagggtatttcttttctctcttcagcccccaacccagtggaggcccggcttgggacattgttcacttcccctcgcttcccctctagaagccccctttgccatccctgcaccttgtttcgggtgatgcccgagagggagctgtggccagcggggactggctcagaacccgtgacccgtgtcggcagctgtgacagcatgatgagcagcacctccacccgctctggatctagtgatagcagctacgacttcctgtccactgaagagaaggagtgtctgctcttcctggaggagaccattggctcactggacacggaggctgacagcggactgtccactgacgagtctgagccagccacaactcccagaggtttccgagcactgcccataacccaacccactccccggggaggtccagaggagaccatcactcagcaaggacgaacgccaaggacagtaactgagtccagctcatcccaccctcctgagccccagggcctaggcctcaggtctggctcctacagcctccctaggaatatccacattgccagaagccagaacttcaggaaaagcaccacccaggctagcagtcacaaccctggagaaccggggaggcttgcgccagagcctgagaaagaacaggtcagccagagcagccaacccaggcaggcacctgccagcccccaggaggctgcccttgacttggacgtggtgctcatccctccgccagaagctttccgggacacccagccagagcagtgtagggaagccagcctgcccgaggggccaggacagcagggccacacaccccagctccacacaccatccagctcccaggaaagagagcagactccttcagaagccatgtcccaaaaagccaaggaaacagtctcaaccaggtacacacaaccccagcctcctcctgcagggttgcctcagaatgcaagagctgaagatgctcccctctcatcaggggaggacccaaacagccgactagctcccctcacaacccctaagccccggaagctgccacctaatattgttctgaagagcagccgaagcagtttccacagtgacccccagcactggctgtcccgccacactgaggctgcccctggagattctggcctgatctcctgttcactgcaagagcagagaaaagcacgtaaagaagctctagagaagctggggctaccccaggatcaagatgagcctggactccacttaagtaagcccaccagctccatcagacccaaggagacacgggcccagcatctgtccccagctccaggtctggctcagcctgcagctccagcccaggcctcagcagctattcctgctgctgggaaggctctggctcaagctccggctccagctccaggtccagctcagggacctttgccaatgaagtctccagctccaggcaatgttgcagctagcaaatctatgccaattcctatccctaaggccccaagggcaaacagtgccctgactccaccgaagccagagtcagggctgactctccaggagagcaacacccctggcctgagacagatgaacttcaagtccaacactctggagcgctcaggcgtgggactgagcagctacctttcaactgagaaagatgccagccccaaaaccagcacttctctgggaaagggctccttcttggacaagatctcgcccagtgtcttacgtaattctcggccccgcccggcctccctgggcacggggaaagattttgcaggtatccaggtaggcaagctggctgacctggagcaggagcagagctccaagcgcctgtcctaccaaggacagagccgtgacaagcttcctcgccccccctgtgtcagtgtcaagatctccccaaagggtgtccccaatgaacacagaagggaggccctgaagaagctgggactgttgaaggagtagactctgcgaccagtacagaccctgtcctggctgaacaagaagagacacatgctccacttgggagcctttgccaccacgcaactcagggctcaagatgaatgggagggagagatttgagtccaagcatacatttatattcagtgttgtgccattgagttcccatgtggatcattctgaaggtgatctccacaagagggtgtgtgtgtgtgtgtttggtgtgtgtgtggagggggggccgctggatacatcactgaagctattgatataacacaatgagtcactgttcagaattttgctcttgttagatgttttcttacattgggtagagtccagcctagtgagagctgagtgaaggggctggccatgcctgagacaaaaagtcaaatgagacaatggacgtgtcaatgacttgaaaaaaagtcacatccagcaaatgcagggtcacatgaaatatgggcctcctggaatccctacagtggatggagactggctcataccttgccagatccctctctcagttccagccttctggacaaggcctgggctaagaggagctgattcgttatctcttcacccactgccctctcagtatcaccagtcccaaagacaggatacgtccctgtaacccaatctctcggttgattgatagcagaacagctcttgttggtctgagaaggcaggataagtgaccacatatttatgccactacctccaccagggagagtccttctccacaggcttgataaattcaatcaccaactgtgctgtcgtccctgactctgctactcccgttcttcctgctttcctgctccgtatctcagtctgcactgaccccagggctgggctgacatcaagatgggagcccagcccacgggctttataaacacccaagaaccgtttcagatcttctctgtgctgatgcaggtagttttaaatttttctcagttccagtgatagaaaacccacacaatacatcctctgccagtcttaatagaatatcagaggtaagaggggcctcagagaagctctgacgcagtgctgctggggaagggaagtgactaaccccgggtcagcctgccatttagggaaagagctgaggttcttacccttgttgcatgctgccacctctccttagccagtgctcttgtacatccacacagcaccctaaggagccatagtcaccatcaaagactcaaccctaaggcccttcaagatctcaaagtgccttctgaagcatcagagattaaatattgttcaaactaatagttattgctgtggcttttaattttatctttggaagatagctatatggtaactcatcattaaccagaacacctctcccctcaaattccgtgaccaagttgtgcagcttgagcaaatgccgaaagagggtattatgggtgggtggtgtgggcttgcaaatacaagcttggaggtgagacatggccagacatgactcctgcttccccttaggaagtaaatcttacttatggttgtgaactgcttggagtccaggatgcccagatgtgaggggcagatgaagggaatgttgctggaaaggtgccttttaaggctgctgagaatttctggactgtgtcctgatggacgcagcaccatcaaagcccagaatttctgaaaacggtgacaaggttaacataaggacaacaaatactccaccctgtcatggtatgtgaggtgtgggtgtggcggtttctgtgtacgtttgctcatacacgcacatccaaaagcctgtgcctcattcctggccatgggtgaggacttggtctgtcacggctgatgaggactcccacaaccggccaagttatgtcttattatacacccccagaaagagagaaagctgccttctggaggactgattccacatgctatattcagctgagttgatttctgtgtctatttcaacccataacctgaagaatgatcaccttattccttattcattaattttcttgattaatagggaaacttgggaatagctataaagtaaaacttgggtggaacctggggccctggcatcacacaagtgtgattaggatggtcaaggtcatcaggagtacagcctattatattcccacatcctgagaaaggtcatttctcccacacacgacaaagtcacagacatcctgcacctgccactaggcatcctcatcctactgacatgcccatttctccagttttcttaatctgagactcccttcccttgttttttaaagataccgtgcttctccacatcctcatccttcaaggagcatattttgctcttaggatggtctttgggattcaagaatagaataataaatccaaacttggtcattcccattttgaagagatgcaagagggcccagtgaggacatccgcctccctgaaagtggtgctagacagagctgaggtcattgtatctgtgtatccacataggatttctcttaattcagcttgaattgatggggagggaggtaagagtagggtcagagttactcatcccttttcaaagaattgtgggtggaagtttgtaaaggccattcatttgattttcaaaatcaaagcgacagctctacttccacttggccttagatctctgctataccctgccatagccttgatgccactgggcacaagccacctgccaaatacaggagtggcctctcccagcctggcatgataggggggtctgtgccctcagatgtgttgacagctgctcttctgaattgccacacctgtgctacacttggaattctgtgctctgactctgcagggtaggaccacgtgccatctcacacagaggtcaaccgatgagcccactcactcgtacatgccttcttccacagtgggaagcatgatctggcaggggccgccctgtaggctggggatgggctgctgtgtgaatgttgacgttcgtttcatggagaaaggggaggtgaaagattgaagagcaggttcctgtcaatgttctgagttcgagctggaggtgtagattgaatagtctacatggtctgtgagtgtgtgagatgaacccttccatcctttgacacctggttgtatgtgtaggctaagaaggaaggaccctcctgtcagtgtgcaaagctgtaatctcatggactagaggagagggggccaaggggatggacaggagaagtcatgcagaatctaagcaggaatgcagatagaacacatctaggctcttttccccaggagagtgatgatggagcatatagatctggctcaaattcagcctccatcacttaccagtcaggaaccctggcgatatcactttaactttctgaacctcagagtcttcacctataagacggggaaaataataccaccctttcaagattgttgagataaataagtgatataaaacatgtaaagcttagttctggccacagtgtagctactcaataaatgataatact

SEQ ID NO: 96 - DNA, 4320 bp, Homo sapiens
acagatcaacagtacaaattctgaagtttgtaaacttgctgatggtggtggtaagccatggcagatgataaagttgctatcttaacggatgatgaagaggaacagaagagaaagtatgtgcttgcagatccctttaatggtatttccagggaaccagaaccaccttcgaatgaaacaccttcctccacagaaacatctgctattcctgaggaggaaatagactggatagagaaacattgtgttaagataaacaacgatcttctaatttccaaggtcttttattttttcttttactctgcctatggctctctctatccccttttgcctgtgtattacaaacagctgggaatgtctccaagccagagtggactactagtaggtattcgttacttcattgaattctgcagtgcccccttttggggtgtagttgcagaccgctttaaaaaaggcaaaattgtcctcctcttttctcttttgtgttgggttttattcaacctgggcattggatttgtcaaacctgctaccttgagatgtgtaccaaagattcgcccaacaactcaccccaccaatgcaagtcaccagttaactatcctgccaacaaattcttcctttacctctttcctcaccatatcaccaaaaatgcgtgagaaaagaaaccttttggaaacagggctcaatgtctcagacaccgttactttgccaacagctccaaacatgaacagtgaacccactctgcagccccagacaggtgaaattactaaccgtatgatggacttgactttgaactcaagcacagcaacccctgtctccccaggaagcgtaaccaaggagacaaccactgttattgttaccaccaccaaatctttaccttctgaccaagtcatgcttgtttatgatcaacaagaagttgaagctatattcttggtgatcttggtagttgtcataataggagaatttttcagtgcctcttctgtcacaatcgtagacacggtcacactccagtatctgggaaaacacagagatcgctatgggttgcagcgcatgtggggctccctgggctggggcctggcgatgctgtctgtgggcatcgggatcgactacacccacatcgaagtgctcatcgatggaaaggggtgtaagccccccgagtacaggaattaccagatcgtcttcatcgtcttcggcgttctcatgaccatggccttgatcgttgccactcagttccggttccgctacaaccatttcaaaaacgatgattctaaagggaaagaggtggagatcccgcaggtggaaaggaacaactctacagagtcctctgaggagacaccaaccaccacaagccactcgcaggccttcaacttttgggacttaatcaagctgctctgcagcgtgcagtatggctcagtgctgtttgtggcttggttcatgggttttggatatggcttcgtgttcacctttctctactggcatttggaagacctcaatggaactacaaccctctttggggtctgttcagtcctgagtcatgtgtctgagctgacagcatatttttttagtcacaagcttattgaattgatcggccacatcagggttctgtacattggcctggcctgcaatacggctcgctatatttatatttcctacctggagaatgcctggactgttctccccatggaagttcttcaaggagtgacacacgcggccatctgggcagcatgcatttcttacctcagtgcagccgttccccctgagctgaggacatctgctcagggcatcctgcagggccttcacctgggtttgggaagaggatgtggtgccatgatcggaggcgtgttagtcaattattttggggctgctgcaaccttccgaggaattggcatggcctgcttggtgatcctactgctctttgccctgatccagtggctggcagtgccagatgaggaagaagacaagacaatgttggcagaaagaattcctgttccctccagtcccgttcctatagcaaccatcgacttggtacagcaacagacagaagatgtcatgccacgcattgagcccagacttccacccaagaaaactaagcaccaggaagaacaggaagatgtgaacaaaccagcctggggagtcagctcttctccctgggtgacctttgtctatgcactctaccaaattaaagagatgatgcaactcacaagagacaaccgtgcttctgagatacagcctttacaggggaccaatgagaatagggaaaattctcctgctggtagagcccagcctgtcccatgtgagactcactctgacccatctagaaaccagccatcccctgacgcagcagcatctcagacgcagaccagccccgctcaccccagtgtggacccgtgcacagaggagagtgaagagcagcaggctcagctggccgcgggaggacactgagggcatcctgctcatctcacaccctgcatggaatcaggctcctcagccaggacacagggtgaggccccccagccaggatatgcctcccctggaggagcacagcactgcatatgcttctaaatatctaaactcattaacatggaaacacacacacaggagctacagtacatattggcaggaaaaggtaaactttcgtaatctcattggaattacaacagggaaatggagttcaatgaggactttcagttctttgcttggttaggttaaggatgatagaatttctctgccagtgcagtaagagttgaaaccggcagttacactaagtaagtggagggaatgaaagtgtttcgaggtgaatgtggatataatttccctcttctgattatttattcttatttggttcctaacacaaactgggaagagatagaattcatctatactttcttttttcttggagagaaccgtttaaaaaattacaagatatatttaaaaagtaaccagataaaagtagcacatgtgcttttgttaaaaataaagttaaaagttaaagttaaaaaatgaagttaaaagtttcatcagaaactttacatatctttagcaaatatatttttatatgtgtatggcatataatggaaataattctttgagcaacagaagctattattaactactgcaagctaagccgagcttaaaaatgccttttgttttaaatgggctttgagaaaaaaaacagaaacaagcgattatttcaaatcaaccaaccaactcagtatcctgtgttttgatagacaagagtttactaaatatattgatactgtaaatagcctctctcgctatttactatcttatagtaattcaggctctaattagctgagggaatgaaacacacaaaaatcactgaattcctaagagttccttaaataagcagtactagttacaaatcacagtataagatttaagtgcctgggggaaggatacaatttttagaaattacatattgggtcagttttgttttgtttttggtgaggaaaaggtggtaaataggaaaccatgaatgggaaggatggcaataagtagcaactatactttccaatgactaaagaaagaaaatctcagtatattcgttctcatgaagacacagtcagacactggacaatgtaatgtatgcaactgcaaacgttacaactgcagccagaacaatggctgggtggatcgcacgtaaagcttgccactaaaaatcaaagcagaggttaacaggaaacctggggggagtgtggaaaagggaaaactgttttagctgaataaaggtgaattatataatttataatagctgtggatgagcacaggagagagaggaaagaaaagaacagtcgaaatgagcaactcaccttaccctctgaccctgattagacaggatcaattgtaaagtgagggcttctccatgacaccatagttctgcccaatactgcatttgggataagaaattctacacttggatgtctcgcttcacaataaaacacagcttaaaaataaaataactgaaagaaatagaattcagcaaatagttattttttgcacttgaactgaaacgtactgtactgtaaattatgactcattttaagtgacctttaaaatcagatgtatttattatgcttgtgtaattatagaaataaagaaatgggtgacaggcttaacctcacctatgaatgtacagtatgtggatttgtgaaactgactgtaggaagtcaaaaacttgtactgtatcttgtgtttacagttctgatttattcctttgaaaagcctgctgttttggaaatgcacagttgacatgttgaaataaaaatgaataccatttttaaaaaaaaaaaaaaaaaaaaaaaaaaaaaa

SEQ ID NO: 97 - DNA, 1498 bp, Homo sapiens
ttacattagcaagagagcaagttgttccagtagttgcctggcaggagaatttgaaagggtgccccaaaggacaatctctaaaggggtaagggagatacctaccttgtctggtaggggagatgtttcgttttcatgctttaccagaaaatccacttccctgctgaccttagtttcaaagcttattcttaattagagacaagaaacctgtttcaacttgaagacaccgtatgaggtgaatggacagccagccaccacaatgaaagaaatcaaaccaggaataacctatgctgaacccacgcctcaatcgtccccaagtgtttcctgacacgcatctttgcttacagtgcatcacaactgaagaatggggttcaacttgacgcttgcaaaattaccaaataacgagctgcacggccaagagagtcacaattcaggcaacaggagcgacgggccaggaaagaacaccacccttcacaatgaatttgacacaattgtcttgccggtgctttatctcattatatttgtggcaagcatcttgctgaatggtttagcagtgtggatcttcttccacattaggaataaaaccagcttcatattctatctcaaaaacatagtggttgcagacctcataatgacgctgacatttccatttcgaatagtccatgatgcaggatttggaccttggtacttcaagtttattctctgcagatacacttcagttttgttttatgcaaacatgtatacttccatcgtgttccttgggctgataagcattgatcgctatctgaaggtggtcaagccatttggggactctcggatgtacaacataaccttcacgaaggttttatctgtttgtgtttgggtgatcatggctgttttgtctttgccaaacatcatcctgacaaatggtcagccaacagaggacaatatccatgactgctcaaaacttaaaagtcctttgggggtcaaatggcatacggcagtcacctatgtgaacagctgcttgtttgtggccgtgctggtgattctgatcggatgttacatagccatatccaggtacatccacaaatccagcaggcaattcataagtcagtcaagccgaaagcgaaaacataaccagagcatcagggttgttgtggctgtgttttttacctgctttctaccatatcacttgtgcagaattccttttacttttagtcacttagacaggcttttagatgaatctgcacaaaaaatcctatattactgcaaagaaattacacttttcttgtctgcgtgtaatgtttgcctggatccaataatttactttttcatgtgtaggtcattttcaagaaggctgttcaaaaaatcaaatatcagaaccaggagtgaaagcatcagatcactgcaaagtgtgagaagatcggaagttcgcatatattatgattatactgatgtgtaggccttttattgtttgttggaatcgatatgtacaaagtgtaaataaatgtttcttttcatt

SEQ ID NO: 98 - DNA, 2045 bp, Homo sapiens
gagattctgtgccccttgtcgggccgcttgtttggctgctgccgtcacctcatggcgacgcgggtagaggaggcagcgcggggaagaggcggcggcgccgaagaggcgactgaggccggacggggcggacggcgacgcagcccgcggcagaagtttgaaattggcacaatggaagaagctggaatttgtgggctaggggtgaaagcagatatgttgtgtaactctcaatcaaatgatattcttcaacatcaaggctcaaattgtggtggcacaagtaacaagcattcattggaagaggatgaaggcagtgactttataacagagaacaggaatttggtgagcccagcatactgcacgcaagaatcaagagaggaaatccctgggggagaagctcgaacagatccccctgatggtcagcaagattcagagtgcaacaggaacaaagaaaaaactttaggaaaagaagttttattactgatgcaagccctaaacaccctttcaaccccagaggagaagctggcagctctctgtaagaaatatgctgatcttctggaggagagcaggagtgttcagaagcaaatgaagatcctgcagaagaagcaagcccagattgtgaaagagaaagttcacttgcagagtgaacatagcaaggctatcttggcaagaagcaagctagaatctctttgcagagaacttcagcgtcacaataagacgttaaaggaggaaaatatgcagcaggcacgagaggaagaagaacgacgtaaagaagcaactgcacatttccagattaccttagatgaaattcaagcccagctggagcagcatgacatccacaacgccaaactccgacaggaaaacattgagctgggggagaagctaaagaagctcatcgaacagtacgcactgagggaagagcacattgataaggtgttcaaacgtaaggaactgcaacagcagctcgtggatgccaaactgcagcaaacgacacaactgataaaagaagctgatgaaaaacatcagagagagagagagtttttattaaaagaagcgacagaatcgaggcacaaatacgaacaaatgaaacagcaggaagtacaactaaaacagcagctttctctttatatggataagtttgaagaattccagactaccatggcaaaaagcaatgaactgtttacaaccttcagacaggaaatggaaaagatgacaaagaaaattaaaaaactggaaaaagaaacaataatttggcgtaccaaatgggaaaacaataataaagcacttctgcaaatggctgaagagaaaacagtccgtgataaagagtacaaggcccttcaaataaaactggaacggttagagaagctgtgcagggctcttcaaacagaaaggaatgagctcaatgagaaggtggaagtcctgaaagagcaggtatccatcaaagcggccatcaaagcggcgaacagggatttagcaacacctgtgatgcagccctgtactgccctggattctcacaaggagctgaacacttcctcgaaaagagccctgggagcgcacctggaggctgagcccaagagtcagagaagcgctgtgcaaaagcccccgtccacaggctctgctccggccatcgagtcggttgactaagatgaggtgtgatcactgtattgagagatatattttgtgtataactttctctgttagtagttaactattggttttgtggtgaaaattttcttactttttctaccatatctgtattttcttagaactactggacttatgtggtacaggaggctgcttagcagttttgaatagtttaatctataaattttcctcagctgtgttgcacatcagcctcgttctccctccactggaatgcatgtgttcactgccttgtcctttctctccctgctccttgcacattatcatcctaatgaaaatttcactgacagggccgaccattacaagggaactttgttctgacgatggttccttgatgtgaaaacaatattaatttaaacgtcttagcccccccccccataatattattc

SEQ ID NO: 99 - DNA, 1796 bp, Homo sapiens
ctgggctcgggtgatcctcctgtcttagccttccaaggtgctgggattacaggtgtgggccaccatgcccagccaccatcttggtttaatttctttccttggaaatggagcaaagggctttcactcttctttttcatggctgcatagtattccataattgtttaaacaattgataatagacactgtatcggggtgactggtatacccccaaaatcacatctgcccagagcctcaggacatggccttgtttggaaatggttttagcagatgcagctaagatgaggtcaccccgtgttaggatggccccgaatccagtgcctggcacccttataaggagagggaaacttggacgcagacaggaaggccgggtgaagacagaagcagagaccgggggccaaggagtgcctggggttgcccagagccaccacgggctgcaagaggtgtgggacagactctctcagccacagaagggcccagccccgcacaggcctggatttcagagggcgaacatttctgtggccgaagctcccagtgcgtttgcagtccttggagacggccgcagacacatttgttcttggcctgtctccaggtctgtagcccccacagtgagcggccactggccggaggggaacaggaagagctggaggggacgtcacacacatgagccttttaggaataacgagtgacacgtgcaagaccccaaaccaaacaccatgtaacctgacacccagggagggagggagggaggggctgggaggggctcacctgtagggaggggctcacctgtacagcggtgctgggaagctggcctcgagggtccccgaggggatacagggccgtgcagcctcttgcctgagggtttgcatgtctgcctggatcccccgggctcctgccagaaggcctctgaggccaccgttgacagcataaaggccacccagtgtctcggcaaccacgctgaccactccctcctcccagctgcggggtgaggtggcctcgagggaagggctggagagtcgttctgagtatttaacaactgggggtgacacagtgtgggtgggcaaggccagggccactgccaggtggggtccgtggccctgagcccccagctctatgcaccccccacctggggtctggcttctccatctccacacccccttgaggggcttctgtctccccctgccccttcgatcgcaggaggcagtgcctggccggggtcgcaggcacctgtcaccccagctcctcactcctcacccactcacatccagtccgtttgtaaaatacacccaggatgagacctgcacgcaagtggctcacagcagcacgatttgtgacagcccgaggcggagaacaccgaacacccagtgaaggtgaggggatcagcacggcgcggccacccacgcacccacgcgctggaatgagactcagccacaaggaggtgcgaagctctgacccaggccacagtgcggatgcaccttgaggatgtcacgctcagtgagagacaccagacacagaagggtacgctgtgatcccacttctatgaaatgtccaggacagaccaatccacagaatcagggagaggattcgtgggtgccgggactggggagggggacctgggggtgactaggtgacataatggggacagggctgccttctgggtgatgagaatgttctggaatcagatgggatggctgcacggcgtggtgaaggtactgaacgccacctcactgtaagacggtagattttgtattttaccacaataaacaaaacaaaacaaaaccaaaaaaaaaaaaaaaaaa

SEQ ID NO: 100 - DNA, 2943 bp, Homo sapiens
gtgctgcctggcgctggctaggaggcaaacgcacgcgggaagagctgctacccattccagggaccctgccgctgcccctctgaggggtctgcacctcctgggagcaggtgggtctctgggacgagggtccatggtggatggctctggagacgctcccgaggctgtgccgtcccgctgctgcacaggtcggagggtcaccgcagaggctactcgggctggggctggggccgagggagcccgcactggagccccatgtggaacccaaggatgcagctgctctgctaacacggcagcccatccttcgagactgtgacctcgccacagtggccctcagccctccacctccggcgggggcgagggccacccacctccaagtctccagccatgacgacctccgcactccggcgccaggtgaagaacatcgtgcacaactactccgaggcagaaatcaaggtgcgcgaggccaccagcaatgacccctggggcccccctagttcgctcatgtccgagatcgctgacctgaccttcaacacagtggccttcaccgaagtcatgggcatgctgtggcggcggctcaatgacagcggcaagaactggcggcacgtgtacaaggctctaacattgctggactacctgctcaagacgggctccgagcgggtggcccaccagtgccgcgagaacctctacaccatccagacactcaaggacttccagtacatcgaccgcgacggcaaggaccagggcgtcaacgtgcgcgagaaggtcaagcaggtgatggccctgctcaaggatgaggagcggctgcggcaggagcgaacccacgccctcaagaccaaggagcgcatggcactggagggcatcggcattggcagtgggcagctgggcttcagccgccgctacggcgaggactacagccgctcccggggctccccgtcctcctacaactcctcctcttcgtcaccccgctatacctccgacctggagcaggcccggcctcagacgtcaggggaagaggaactgcagctgcagctggccctcgccatgagccgtgaggaggcagagaagcctgtccccccagcctcccacagggacgaggacctgcagctgcagctggctctgcgcctgagccggcaggagcacgagaaggaggtgaggtcctggcagggtgatggctcccccatggccaatggtgcaggggccgtggtccaccatcagcgggacagagagcctgagagagaggagagaaaggaggaggagaagctaaaaaccagccagtcctccatcctggacttggctgacatcttcgtacctgccctggccccgccctccacacactgctctgctgacccatgggacatcccaggttttaggccgaacacagaggccagtggatcctcctgggggccttctgcagacccctggtctccgatcccctcaggaaccgtcctgtcccgaagccagccctgggatctgactcccatgctctcctcctctgagccctggggcaggaccccagtgctgcctgctgggccccccaccacagacccctgggccctgaactctccccactacaaactccccagcactggggctgacccttggggagcctccctggagacctccgacacacctggtggtgcctcgacctttgacccatttgccaaacctccagaatccacagagaccaaggaggggctggagcaggccctgccctctgggaagcccagcagccctgtggagctggacctgtttggagaccccagccccagttccaagcaaaatggcacgaaggagccagatgccctggacctgggcatactaggggaagcactaacccagccaagcaaagaggcccgagcttgccggactcccgagtccttcctgggtccctcagcttcctccttggtcaaccttgactcgttggtcaaggcaccccaggttgcaaagacccggaaccccttcctgacaggtctcagcgctccgtcccccaccaacccgttcggcgcgggcgagacgggcaggccgacgctaaaccagatgcgcaccggctcgccggcgctgggcctggcaggcgggcctgtgggggcgcccctgggctccatgacctacagcgcctctctgcccctcccgctcagcagcgtgccagctggcttgaccctccccgcctcggttagcgtcttcccgcaggccggagccttcgcaccgcagccgctgctgcccacgccgagctcagccgggccgcggcccccgcccccgcagaccggcaccaaccccttcctctgagccccgccccgtcccataccggcctgcgcctgcgccggacgctccgcggccccgcctccggacccggggctgggcggggcgccggtgctagtggaacgccgtgccagtggcggctggtatcccgcggcggctctggaagctggacgcggaccacggcccgggagctagaaactgaacgcccgcataataaagactggaacccacgttctcagctctcaccaagtggactttttgcggggtgtggcggccgggtctcgaccacagcgtggatcaccggctgtttaggaaactgcagctgcacaacgtggggtgcaaaactgccccgcttcctttacagctcttctcaaccctcacctccatcccccgtcacccaggcaccttcgcttccagatgctgccaggctgtcactcaattcggtcatttcattcatttatcacacatgggcactggggttgggctaacagcaagagacaataggcctttgttcctatttattgggtactgcttacgtgctaagcagatcagtttatttaatgcttgcaacgactctctgaggtagaaaatattgttaattccgttcaggatcccggctacataatctgtggggctcaatacaaaataaaaatgtaggggctccttgttcaaaaaaaaaaaaaaaaa

SEQ ID NO: 101 - DNA, 5879 bp, Homo sapiens
cgccagggctgcgtaggcttgtggcgcgcccgcggagaggccggggctctgacgcccgctctgcggcttcggtgtttgaacaggccacagtccaggagcgcttacattcaggagctccgcgtagcacctgcccaaccaaactcagccctccgttaagatcctggttccatgccgcagtaggacagcaggcccaagtctgcacatcccagtgatgcaccatgccaatagtggataagttgaaggaggccctgaaacccggccgcaaggactcggctgatgatggagaactggggaagcttcttgcctcctctgccaagaaggtccttttacagaaaatcgagttcgagccagccagcaagagcttctcctaccagctggaggccttaaagagcaaatatgtgttgctcaaccccaaaacagagggagctagtcgccacaagagtggagatgacccaccggccaggagacagggcagtgagcacacgtatgagagctgtggtgacggagtcccagccccgcagaaagtgcttttccccacggagcgactgtctctgaggtgggagcgggtcttccgcgtgggcgcaggactccacaaccttggcaacacctgctttctcaatgccaccatccagtgcttgacctacacaccacctctagccaactacctgctctccaaggagcatgctcgcagctgccaccagggaagcttctgcatgctgtgtgtcatgcagaaccacattgtccaggccttcgccaacagcggcaacgccatcaagcccgtctccttcatccgagacctgaaaaagatcgcccgacacttccgctttgggaaccaggaggacgcgcatgagttcctgcggtacaccatcgacgccatgcagaaagcctgcctgaatggctgtgccaagttggatcgtcaaacgcaggctactaccttggtccatcaaatttttggagggtatctcagatcacgcgtgaagtgctccgtgtgcaagagcgtctcggacacctacgacccctacttggacgtcgcgctggagatccggcaagctgcgaatattgtgcgtgctctggaactttttgtgaaagcagatgtcctgagtggagagaatgcctacatgtgtgctaaatgcaagaagaaggttccagccagcaagcgcttcaccatccacagaacatccaacgtcttaaccctttccctcaagcgttttgccaacttcagcggggggaagatcaccaaggatgtaggctatccggaattcctcaacatacgtccgtatatgtcccagaataatggtgatcctgtcatgtatggactctatgctgtcctggtgcactcgggctacagctgccatgccgggcactattactgctacgtgaaggcaagcaatggacagtggtaccagatgaatgattccttggtccattccagcaacgtcaaggtggttctgaaccagcaggcctacgtgctgttctatctgcgaattccaggctctaagaaaagtcccgagggcctcatctccaggacaggctcctcctcccttcccggccgcccgagtgtgattccagatcactccaagaagaacatcggcaatgggattatttcctccccactgactggaaagcgacaagactctgggacgatgaagaagccgcacaccactgaagagattggtgtgcccatatccaggaatggctccaccctgggcctgaagtcccagaacggctgcattcctccaaagctgccctcggggtccccttcccccaaactctcccagacacccacacacatgccaaccatcctagacgaccctggaaagaaggtgaagaagccagctcctccacagcacttttcccccagaactgctcaggggctgcctgggaccagcaactcgaatagcagcagatctgggagccaaaggcagggctcctgggacagcagggatgttgtcctctctacctcacctaagctcctggctacagccactgccaacgggcatgggctgaaggggaacgacgagagcgctggcctcgacaggaggggctccagcagctccagcccagagcactcggccagcagcgactccaccaaggccccccagacccccaggagtggagcggcccatctctgcgattctcaggaaacgaactgttccaccgctggccactccaaaacgccgccaagtggagcagattctaagacggtgaagctgaagtcccctgtcctgagcaacaccaccactgagcctgcaagcaccatgtctcctccaccagccaaaaaactggccctttctgccaagaaggccagcaccctgtggagggcgaccggcaatgacctccgtccacctcccccctcaccatcctccgacctcacccaccccatgaaaacctctcaccccgtcgttgcctccacttggcccgtccatagagccagggctgtgtcacctgctccccaatcatccagccgcctgcaaccccccttcagcccccaccccacattgctgtccagtacccccaagcccccagggacgtcagaaccacggagctgctcctccatctcgacggcgctgcctcaggtcaacgaggaccttgtgtcccttccacaccagttgccagaggccagtgagcccccccggagcccctctgagaagaggaaaaagacctttgtgggagagccgcagaggctgggctcagagacgtgcctcccacagcacatcagggaggccactgcggctccccacgggaagaggaagaggaagaagaagaagcgcccggaggacacagctgccagcgccctgcaggaggggcagacacagagacagcctgggagccccatgtacaggagggagggccaggcacagctgcccgctgtcagacggcaggaagatggcacacagccacaggtgaatggccagcaggtgggatgtgttacggacggccaccacgcgagcagcaggaagcggaggaggaaaggagcagaaggtcttggtgaagaaggcggcctgcaccaggacccacttcggcacagctgctctcccatgggtgatggtgatccagaggccatggaagagtctccaaggaaaaagaaaaaaagaaagcaggagacacagcgggcagtagaagaggatgggcatctcaaatgcccaaggagtgccaagccccaagatgctgttgtccccgagtccagcagctgcgcaccatccgcgaatggctggtgtcctggggaccgcatggggctgagccaggcccctcctgtgtcttggaatggagagcgggagtctgatgtggtccaggaactgctcaaatactcatctgataaagcttacgggagaaaagttctgacctgggatggcaagatgtcggcggtcagtcaggatgctattgaagacagcagacaggcccggactgagaccgtggttgatgactgggacgaagagtttgaccgagggaaggaaaagaaaattaaaaaatttaagagagagaagaggagaaacttcaacgccttccagaaacttcagactcgacggaacttctggtctgtgactcacccagcaaaggctgccagcctcagctatcgccgctgactgtgcccctgtggaaggaggtcggttccgagggggtgggtgtaagggtgaggtgggggtgtgtgtgccgtgtatgtgtgtaggggtgtggtggggtgtggcgtgtgtgtatgatgtatgtgggctgtgtatctggcacatgtgtgttgggtggtgtgtgtggtgtgggcgcgtctgtggtgtgtgtcctagtcacttggagaagggtgtgtgtgggatgcgtgtgtataagggggtgtgtgtgggatgcgtgtgtataagggggtgtgtgtagtgtgtgttgggtgtggggtgtgtacacctggcatctgtggcatgtgttctggtcacttggagaagggcatgtgtggggtgtgtgtgggatgtgggttgtgtgtatatctggcatgtgtcccagtcacttgcagaagggtgacttcttgccagccgcatcgagatgccatgcattgggttcctaggttggactcatacccgagggtggcagtgggaagattcgggtctcgtttctctctgtcaggactaccgtggtttgttctgcagcctcctggagacaaggcgtcccttcccgggagctgtcggtctggatctgagggagctctctgtgtgggctctgctgtgctgggagcctgtcacggtaggagctctcccggtaccagtgtccacagaccgcccaacatagaggctttgaggcttctctagatcggaacctctttggtgacattcccgaccagccctgcaagagaaacgacagtgtgtgtgtgagcagaggtggctgcacacctgctggacatctttgccaggctgtgccttctcatgtttcatagacagtggtctgtgctggcagaggctgctgcccctggttggggctatcaggagagtgggggatggtggccacatgtcctccaggtggtctcccggtgcatagctggtggctctgggcaagccatcccttgcttctcggggctgacgccaccgttgtgtccgagcccgccctcccctgcttcctcagcgggaccccttcatctgttggccttacctgtcctcagaaaggaagaggtgaccccacccagccacctctcccttttatggaactcgagagggtggccctactgtgcaccccttccttgtgagtagctctcaactgtcctggagagcagaggctatttggggtcggaggagccctcgatacctgcgaatacatctgctttccaggctgctgtttattctgagacgactgtgctgtagcttcccttgcagctgcaataacccgcaggtcttcactgaggtggaggctttggggtagaattctccatttattttactacttaatacaaaacatttatttttgaccagtcctgtggcttccattagcaatatgtttcctttcccaaatatgcaaatagtggctttgtttgctcaattttgtgagtgctttggaatttaaatgattgtataactcaagaagattacttttctatgttgctcaagctgtgcctgccaacttgtaacttaataaatacaggaaatcctcagagaaggtgatattttcaggaaaaagacaaatgccctcatagtagtgggaagtgtgaaggtgaccgtgaacatccttcctcatcgggtctgtccccgtcatttcctcccggagtcgtcgcaggtggagatggacaacgtggtgttggacttagacctccttcagtgtggctctgctgggccagaggcatcctgctgtcccgggtggctgcctcgctgtctgcaccccctctccctggggcagctttgcttcctgcccctgtgctcggggcctgggtggttactggcgtgtagatggaattgcttttttaatatgggaagatacatttatttttttccatgtgggtgggtgtctctttttggattttcttctgtttttacgtttctcttcttagaagggtgggagagaatcaagctcctgtggccacctgtgtcccagcagcagtgagtggagctgctcagggtgccctctcctgcggaccagtctctgaatgttcaaagatgagggcctggcttccgtgctctggctttgtaacttatctggaagggaaagcacatgccttcacgggcaggatgatcaagcggtgctgattcacgagagtggaagcctccagagcttggggctttctggctgctcttcattgacctgtgtgttcccagcacacgaacagcgcccctaacggagatttgttcagcgactgaatatacacctgtaaacgagtagcatgtatacattgattttgattacaaatggttctgtattat

SEQ ID NO: 102 - DNA, 1889 bp, Homo sapiens
ccgggtggatggagttggaggggcggggtgctggcggtgtggcgggggggcaggcggcagggcccgggcggagccccggggagtcggcgctgctggacgggtggctgcagcggggcgtgggccggggggccggcggcggggaggccggggcctgcaggcccccggtacgacaagatccggactccggcccggactacgaggcgctgccggctggagccactgtcaccacgcacatggtggcaggcgccgtggcagggatcctggagcactgcgtgatgtaccccatcgactgcgtcaagacccggatgcagagtctacagcctgacccagctgcccgctatcgcaatgtgttggaggccctctggaggattataagaacggagggcctatggaggcccatgagggggctgaacgtcacagcaacaggcgcagggcctgcccacgccctttattttgcctgctacgaaaagttaaaaaagacattgagtgatgtaatccaccctgggggcaatagccatattgccaatggtattgagccttcctgtgctggttcccccactttcccaactctttgggctttgctgctgtcagtgctttccagtctcagcatggtttggagctgaagctttgggctgggataggccactggtggcaggtgatgtgctggcatccctaggcagcagtgtatctgcttcctgtctggggtgtgagctgcatttattctcagaatgatctttattgataagacttgagctggccttcctatcatggatgtggaatacattagtgaccttacaaagttggtgggaacagatactttaccttcttaaacaggagtttaggagcagtgggtccccatcttttggactagctcttaacgttacttttccccgctgtagtgtagcacagccactccccttcactgggggacctcagtgagttggtcagctctcttggccttacatgtggcagttgttttcttgtttgcaggtgcggccgggtgtgtggcaacattacttcatgatgcagccatgaaccctgcggaagtggtcaagcagaggatgcagatgtacaactcaccataccaccgggtgacagactgtgtacgggcagtgtggcaaaatgaaggggccggggccttttaccgcagctacaccacccagctgaccatgaacgttcctttccaagccattcacttcatgacctatgaattcctgcaggagcactttaacccccagagacggtacaacccaagctcccacgtcctctctggagcttgcgcaggagctgtagctgccgcagccacaaccccactggacgtttgcaaaacactgctcaacacccaggagtccttggctttgaactcacacattacaggacatatcacaggcatggctagtgccttcaggacggtatatcaagtaggtggggtgaccgcctatttccgaggggtgcaggccagagtaatttaccagatcccctccacagccatcgcatggtctgtgtatgagttcttcaaatacctaatcactaaaaggcaagaagagtggagggctggcaagtgaagtagcactgaacgaagccaggggttcagatgacactgctgcatcctggtcacattctctgtctcctggaatgctcccacctcaagtggagttagaaggaaggtagaggggctctcccccaggattttggtgttttgactaacaccagttcctgccaacctctgttgccaccacctttccttccaggccctaagcacgtgcagcaaagcacaccacagcacctttgataacctctctccatcctgggcctgatgacctgctctagactgttatagagggataagcagctcattcccctggttcctaataaaaagcctttaaatt

SEQ ID NO: 103 - DNA, 2354 bp, Homo sapiens
gttccctgtcatcagtatgcagcgattgctctttccgccgttgagggccttgaaggggaggcagtatctgccgctcctggctcctagggcagcgcctagagcacagtgtgattgcatcaggcgccctttgaggccagggcaatacagcaccatctctgaagtagctttgcaatctggaaggggtacagtgtcccttccctcaaaggctgctgagcgggtggtgggccgatggctcctggtctgcagtggaacagtggctggagcagttattcttggtggagtaactaggttgacagagtctggcctctcgatggtagattggcatttaataaaggagatgaagccacctacaagccaagaggaatgggaagcagaattccaaagataccagcaatttccagaatttaaaatcttgaatcatgatatgacactgacagaattcaagttcatctggtacatggagtactcacaccgaatgtggggtcgccttgtaggccttgtgtacatcctgcctgctgcctacttttggagaaagggctggctcagccgtggcatgaaaggacgtgttcttgccctctgtggcctcgtctgcttccagggtctgttgggatggtatatggtgaaaagtggactagaagaaaaatcagactcccatgacatccctcgggtcagtcagtaccgccttgctgcccacctgggatcagccctggttctttattgtgccagcttgtggacctcactgtcactgctactccctccgcacaagttgcctgaaacccaccaactcctacagttgagacgatttgctcatggaacagcaggtctggtgttccttacggccctctcaggggcttttgtggcagggctagatgctgggcttgtttataactcctttcccaaaatgggagaatcctggatcccggaggacctctttaccttctcccccatcctgaggaatgtttttgagaatcccaccatggtgcagtttgatcaccggattctgggaatcacttcagtcactgccattacagtgctctacttcctctctcggagaattccccttcctagaaggaccaagatggcagcagtgactctgctggctttggcgtatacacaggtgggcttgggcatcagcacgctgctgatgtatgtcccaactcctctggccgccactcaccagtcaggctccttggctttgctcactggtgctctttggctgatgaatgaactccgaagagtcccaaaatgattcttagaggaccagcctcctgggactgtgactgcttttgagagctcttcagagatcataagaacttgggcttttctacgagatgaccttgacataccaagtggtttccaaatggtcaacttacttaaaaatcttttcctgttttgagatagtcactggatcaagaatgcattaagtgtggttaccctaaatgttcccttttaaatctgcttttcatgttgaaaatcagttttaatgtagagaaagaaatgtctgccatttgctgcttaacaggctttgtgtcaggtttttcagtgttggcaagctcttggttctacgtggatgatttctacgtggatgttctcctgagtccttaattctgcctaaatagaatttctttatgatcttaacttcacttccattaggtgaagattgaaaggataggattgacatacccaaagtagccagctggtcttcagcaaaaaaaaaaaagctaatgtcttctaatatcctgattttcagaaatggggaaattgcagattttgacaagcttaatgtgtatatgtagcaaaatggtttttaagtacttggaaaaggaggtaatcgccaaatagttccatttttttttttttttttgagacagagtttcactcttgttgcccaggctggagtacaatggcgtgatctcagctcactctgcaacctccacttcccaggttcaagcgattctcatgcctcagcctcccgagtagctgggactacaggcacaagtcaccatgcctggctaattttgtatttttagtagagaaggggtttcaccacattggccaggctggtcttgaactcctgacctcaggtaatccgcccatctcggcttcccaaagtgctgagattacaggcatgggccaccacgcccagctagttcctcttttgataaggctgttaacattacaaggtcagagagaggaatggaatcgacagtataaattggttcctgagagggtttcctaacagctttgtaataagaaaaatatggccttgatggtgtagtgcatggacatctacccagataaacaaattgttgactgctgaaaaaaaaaaaaaaaaaaaaaaaaaaaaaaaaaaa

SEQ ID NO: 104 - DNA, 1370 bp, Homo sapiens
ggggcacccactggaaggagaggccaggcggaagaccctggctccgtcatggcctctgccctgaggccaccccgtgtccccaagcctaagggtgtcctgccttcacactactatgagagctttctagagaagaaggggccctgtgaccgggattacaagaagttctgggcaggcctgcagggtctcaccatttatttctacaatagcaatcgggacttccagcacgtggagaagctcaacttgggagcatttgagaaactcacagatgagattccctggggaagctcacgtgaccctggcacccacttcagcctgattctccggaatcaggagatcaagttcaaggtagagaccttggagtgtcgggaaatgtggaaaggcttcatcttaacggtggtggagctccgtgtcccgaccgacttgaccctgcttcctgggcacctatacatgatgtctgaagtcttggccaaagaggaggcgcgccgtgcactggagacaccctcgtgcttcctgaaggtgagccggctggaggcacaactgctcctggagcgctaccccgagtgcgggaacctgctgctgcggcccagcggggacggcgccgacggcgtgtcggtcaccacgcggcagatgcacaacgggacgcacgtggtccggcattacaaggtgaagcgggagggccccaagtacgtgatcgatgtggaacagccgttctcttgcacctccctggacgccgtggtcaactatttcgtgtcgcataccaaaaaggcgctggtgccattcctgttagacgaggactacgagaaggtgctaggctacgtggaagccgataaggagaatggcgagaatgtgtgggtggcgccctccgctccgggcccaggtcctgcaccctgcacaggtggccccaagccgctgtcacctgcgtctagccaggacaagctgcccccactgcccccactaccgaaccaggaagagaactacgtgacccccattggagatggcccagctgttgactatgagaaccaagatgtggcttcctctagttggccagtcatcctgaagccaaagaagttgccaaagcctcctgccaagcttccaaagccacccgttggacccaagccagagcccaaagtctttaatggtggcttgggcaggaagctgccagtcagttcagcccagcctctcttccccacagccgggctggcagacatgacggcagagctacagaagaagctggagaagaggcgggcactggagcactgattcggacacaccagggaccagcgggctagtcccagggcatggcccagcggccagattctttttcccaggattaaaactctgaccccaggaaaaaaaaaaaaaaaaaaaaa

SEQ ID NO: 105 - DNA, 2160 bp, Homo sapiens
ccagaacacccctatcttctaggattgacactggctgtcaaactcatccttcaaggtgattcctggcctgccctcctcctccaggcagcctgtcctcctcctccaggcagcctgtcctgaccctcagcagcctctcctggccttggcagagcccctcgtgtcctcccttgcagcacgcatgggaagaaaggccatcgtcctcgccattgctaacaccagccttgcgtttcctctttgccagcacctggtgacgttctgcctgggtgaggacgatggcgtgcataccgtggaggatgcctccaggaagttggccgtcatggatagccagggccgagtctgggcacaggagatgctgctgcgagtgtctcccgaccatgtcacgctgctcgacccggcctccaaggaggagctggagtcgtacccactgggcgccatcgtgcgctgtgacgcggtgatgccacccggcaggagccgctcgttgctgctgctcgtgtgccaggaacccgagcgcgcgcagcccgacgtgcacttcttccagggcctgcgcctcggggcggagctgatccgagaggacatccagggggctctgcacaattaccgctcgggccgcggggagcgcagggcggcggcgctcagggccacgcaggaggagttgcagcgcgaccgctcgcccgccgctgagaccccgcccctgcagcgccgcccgtcagtccgcgcagtgatcagcaccgtagagcggggcgcgggccgcggacgaccccaggcgaagcccattcccgaggcagaggaggcgcagaggcctgagccggtggggacctcgagcaacgctgactcggcctccccggacctgggtccccggggtcctgacctggcggttctgcaggcggagcgggaagtggacatcctgaaccacgtgttcgacgacgtagagagctttgtatcgaggctgcagaagtcggcggaggcggccagggtgctggagcaccgggaacgcggccgcaggagccggcgccgggcggctggggagggcttgctgacgctgcgggccaagccgccctcggaggccgagtacaccgacgtgctgcagaagatcaagtacgccttcagcctgctggcccggctgcgcggcaacatcgccgacccctcctctccggagctgttgcacttccttttcgggcctctgcagatgattgtgaacacgtcgggggggccggagttcgcgagcagtgtgcggcggccgcatctgacatcggatgccgtggcgctgctgcgggacaacgtcactccacgtgaaaacgagctctggacctcgctgggggactcgtggacccgccccgggctggagctgtccccggaggagggacccccatacagacccgagttcttcagcggctgggagccgccggtcactgacccgcagagccgcgcctgggaggacccagttgagaaacagctacagcacgagcggaggcgccggcaggtgacccaagcgacacagcagggccgaggctgggaagtccgggggcgcggccggtccgcctggccccgcctgacccgactgtcttacttcctacagcaaagcgccccccaggtcgctgtcaatggtcaccgagacttggagccagaatctgagcctcagctggagtcagagacagcaggaaaatgggtcctgtgtaattatgacttccaggcccgcaacagcagtgagctgtcggtcaagcagcgggacgtactggaggtcctggaggacaaagagaaagtgtcagagctggaggcagtgatggagaagcaaaagaagaaggtggaaggcgaggtggaaatggaggtcatttgacctgccaggcgcccttcgcaaagagtgacgaggccccgtgggagaacggactcctcagactctccccaatagcggaagtcgatcttctgaaggatggccaatctgctccggccctggtcttcccccatcccggtggacagacttaacgatccttgctgcagtccctccggagaggatctggactggctgggagtggggagggcgtggagacagtctacggaaagcgctagcagacccccgagagggtgcagtggagccctgagcattgtaatatgcggcccagcctataaacagcctccgtgcttaaaaaaaaaaaaaaaaaaaaa

SEQ ID NO: 106 - DNA, 571 bp, Homo sapiens
gcatatacatacaggtttatttaaatgattggatctacacttttggaggctatttgaagtatcttatcaaaataaaacgcattttaagcaagaagttaaaaaagcttttcagacccgaaggccatttaatacagtaaatcttacttgggtagtttagcaaacattttttaaaacccacatccaacagattggttagtattagatacacagatttggtttcaaagctgaaatacccctggtggaataaatcttctcatgaaattcagttatattatgccacaaaacagggacacttatctattgacaacttaaatattaactcagtgggctacctggtgatataaataggaaaaaaacagtggtcatggattaggagtgagaagactatgacaccagcctaccttggactgggaccgcaaaggatgttaaaatctatcctagaatttaaaacaggagaaatgtcaaatattccagtctccattcggctcaagccatcgcccaaggaatacacccccaccccagccccacatgaggtttactaaccagctgctacagatgttactatgtcact

SEQ ID NO: 107 - DNA, 644 bp, Homo sapiens
  misc_feature (1)..(644): n = a,c,t, or g
gcatcctcctgccttggcctcccgagtagctgggactacaggcgcacaccaccatgccaagctaatttttaaatttttttgtagagatggggtctcacttttgttgcccagggtgctttagaacccctgggctcaagtgatccttgacctcccacagtgctgggattacaggtgtgagccaccgtgcctggcctcatgggttttctttgttttgttttgttttgtttttgagacagagtctcactctgtcactcaggctggagtgcagtggcacgattttggctcactgcaacctccaccttccgggttcaagcgattctcctgcctccgcctcccgagtagttggggttacaggcatgcgctaccacacctggctagttttttattgttgttgttttttgtatttttagtggtgacggggtttgctctgttggccaggctggtctcaaactcctgacctcaggtgatccccacttcagcctcccaaagtgctgggatgacaggcatgagcctctgcacctggcctcgtgtnttttttttagttagccattttatacgtgtttactgaacacctgtcctgtgcccatattctaagtgccttacctgcattaaactcatgtaaccttcacaacccgaaaaaaaaa

SEQ ID NO: 108 - DNA, 448 bp, Homo sapiens
tttttttgggaacatttactaatcttttatttgcttttcttggcactcataacattttttaccctttaaaacagattcaagtgattcaaattccagttacctctaagttatattctgttaacaaccaccttgtataaattggtttcataaataaaaactgctcttaaatgattctgtcagtggatgtctatccacaagctttccagcctggtctgctttatgtgtacatcctgaaaatttgccaaaatagcagcaacaactgatgatatcatagggaaaaaactcactgccacaagaaaccaagcattgttgagtcaacttctttttggtcacttgttttatacttactagataagccaaaagacctgtttgttacacaaacatgcatgcatccaggtattaatccattctcacactgctatgaagaaatacccgagactgggtaatt

SEQ ID NO: 109 - DNA, 3319 bp, Homo sapiens
ggcccggcccgcggcggcggcaaaggggcggaggggttcgctgccagcaattgccaagctgctgcggtcgtggcgggatggtatagccgggcctgagggcgggcggcggggcgcgggcgggggcgaggcggccgggaagggccgacgccgcctgactggcttgggagcagcggcagcaagctgagggggcgtcgccgccgccggcccccggcgccgccgcgggaggccgcgcccgccatggcggcccgggcggtgctggacgagttcactgcgccagctgagaaggcggagctgctggagcagagccgcggccgtatcgagggcctgtttggcgtgagcctagccgtgctcggcgcgctaggggctgaggagccgctgcccgcgcgcatctggctgcagctctgcggggcgcaggaggcggagcacagcgccaaggaatatattaaaggaatctgtgaacctgaactagaagaaagagaatgttaccccaaggacatgcactgcatttttgttggggcagagagcctgtttctgaaaagcttgattcaggatacttgtgctgacctctgcattctggacattggccttcttggcatcagaggaagtgctgaggctgtggtcatggctaggagtcacattcaacaatttgtaaagctctttgaaaataaagagaacctacccagtagtcagaaagaatcagaggtgaaaagggaattcaaacaatttgttgaagcccatgcagacaattacacaatggatttgttgattttgcccacttccttgaaaaaagaacttttgacactcacacaaggtgaggagaatctctttgaaacaggagatgatgaggttattgaaatgagagattctcaacaaacagagtttacacagaatgctgccacagggctgaatatttctagagatgaaactgttttgcaggaagaggcaagaaataaagctgggactcctgtttctgagcttacaaaacaaatggacacagtcctttctagctcaccagatgtgctttttgatccaataaatggtctaaccccagatgaagaggcactttccaatgagagaatttgtcagaaaaggagattttctgattctgaagaaaggcatacgaagaagcagttttctttggaaaatgttcaggagggggagattttacacgatgctaagacattggctggaaatgtaatagctgacctatctgattcttctgctgattctgaaaatttaagtccagatataaaagaaactactgaggaaatggaatacaacatcctcgtaaacttttttaaaaccatgggctactcccaagaaattgttgaaaaggtcattaaggtgtatggaccatctactgaaccattattgctcttagaggaaattgaaaaagaaaataaaagattccaagaagacagagaattttcagctggtacagtgtatccagagaccaacaaaaccaaaaataaaggtgtttatagcagcacaaatgagcttacaactgattccactccaaagaaaacacaggctcacacacagcaaaatatggtagaaaaattttctcagttaccattcaaagtggaagctaaaccatgtacctcaaattgtagaattaatactttcagaacagtgccaatagaacagaaacatgaagtctggggttcaaaccagaactacatttgtaacacagaccctgaaactgatggcctttcaccttctgttgcctctccaagtcccaaagaagtcaattttgtttcaaggggagcttcaagtcaccagcccagagttccactttttcctgaaaatggtttacaccagcagccagaacccttgcttccaaataatatgaaatctgcctgtgaaaaacgtttaggatgttgtagttctcctcattctaagccaaattgctcaaccctttctccaccaatgccactgccccagctgttaccttcggttactgatgcaaggtcggcaggaccttctgatcatattgattcctcagttactggggttcaaaggtttcgagatactctaaaaataccctacaagctggaattaaaaaatgaaccagggagaacggatttgaaacacattgttatagatgggagcaatgttgcaattacccatggtctgaaaaagttcttttcttgtcgtggaattgcaattgcagttgaatatttttggaagcttggcaacagaaacatcactgtatttgtccctcagtggagaacaaggcgtgatcctaatgtcacagaacagcacttcttaacccagctccaggagctcggaatattatctttaactcctgcccggatggtctttggagaaagaattgcttctcatgatgacaggtttctactacacttagcggacaaaactggtggcataattgtgacaaatgataatttcagagaatttgtgaatgagtcagtctcttggagagaaattattacaaaaaggctgctgcagtacacgttcgtgggggacatatttatggttcccgatgatcctctgggaagaagtggacctcgattagaggagtttcttcagaaggaagtctgtcttagagatatgcagcccctactcagtgccctgccaaatgtgggcatgtttgaccccagcttcagagtccctggcacccaggcagccagcaccagccaccagcctccgacccggattcagggagccccttcaagccactggctccctcagcagccccacttcccactgctgccagccctccccagtctccagcagaacctgcccatgccagctcagagatcttctgcagaaaccaacgagctgagggaagcccttctgaagatcttccctgactcagagcaaagactgaaaatagaccagatcttggtggcccacccatacatgaaagatctaaatgcgctttctgccatggtgttggattgaagattgtgctgagcgctgagcttgcgctcagggctggctgatcaaactcaagctcacacctgtacctgatgggaatgaacataatgtgaagaaacttatttcccagtgtaaacgcagttgtacagaaaaaaaatgttttgggtataaatctgggttttcaaaaccagcttttttctatatataaattatgctgctattacagatttaacattttctgttaaaggaaagtctacattttctgcctgttcagaactgtttaatagcagttactcttgagtgtatttacctttttatgttttttaaactattttccttaaagccgaaaatattgacaaatggatatggttagcctttataaataaataaaaaaaaaagtgttgctttcttaagg

SEQ ID NO: 110 - DNA, 531 bp, Homo sapiens
  misc_feature (1)..(531): n = a,c,t, or g
ttttttttcaaactgcaaaacccgttttatttttaataaaaggcctcacttccaaggagagcccagcccaggagatccccggtgaatcgtcaagcctgggtcctcggggagccggcgttcctgctgagctgatgttgtacttctgaaggcctgtgatcgctaactgcaccatgaggcagaatncangggtgctctcaaccagctgggggttggggttcaggctttttttcatctttcggccaaggcagacaacaacggactcatcatcccacgcgactgagtgacgcgaggcttcaaacgcaagcacgagtgtttagaatcctgcattttcaaaggctcttgcccactgggaactacatggagaggagattaagaacaacaaccaaaagaggcagggggtggggcaggcttgaggtaggggtgggntgggntgacagtcaacacagctnggaccagaagnccatggnccctggctccctggaaaggcacagggcacagacggatgccgccttttcttgctgggacactcct

SEQ ID NO: 111 - DNA, 10802 bp, Homo sapiens
gtgtcggacggcatgacaggcagcaatcctgtgtcccctgcctcatccagttccccagcctctagtggggcaggcggcatctccccgcagcacatagctcaagattcctcactggatggacctccaggccccccagatggtgccacagtgcccctggaggggttcagcttatcccaggctgctgacctggctaacaagggcccgaagtgggagaagagccatgccgaaattgcagaacaggccaagcatgaggccgagatcgagactcggattgctgagctgcggaaggagggtttctggtcactgaagaggctgcctaaggtgccagagccccctcgccccaaaggtcactgggactatttgtgcgaagagatgcagtggctctctgctgactttgctcaggagcgccgttggaaacggggtgtggcccggaaggtggtgcgcatggtgatccggcaccacgaggagcagcggcagaaagaggaacgggcccggagggaggagcaggccaagctgcgtcgaattgcttccaccatggccaaggatgtcaggcagttctggagcaatgtggagaaggtggtgcaattcaagcaacagtcccggcttgaggaaaagcgcaaaaaagccctggacctgcatttggacttcattgtggggcaaactgaaaagtactcggaccttctgtctcagagcctcaaccagccattaacctccagcaaagcaggctcttccccttgcctcggctcttcctcagctgcctccagtcctccaccccctgcttctcgcctggatgatgaagatggggactttcaaccccaagaggatgaggaagaggatgatgaggaaacgattgaagttgaagaacaacaggaaggcaatgatgcagaggcccagaggcgtgagattgagctgcttcgccgtgagggagaattgccactggaagagctgctccgttcccttccccctcagctgttggaagggccttccagcccctctcaaaccccctcatctcatgatagtgacacccgagatgggcctgaagaaggtgctgaagaagagccccctcaggtgttggagataaagcccccaccctctgctgtcacacagcgcaacaaacagccttggcatccagatgaagatgatgaagagtttactgccaacgaagaggaagcggaggatgaagaggatactatagcagctgaggaacagttggaaggggaggtggatcatgccatggagctgagcgagttggctcgagaaggtgagctttccatggaggagctattgcagcagtatgcaggagcctatgccccaggctctgggagcagtgaagatgaggatgaagatgaggttgatgctaatagctctgactgtgaaccagaggggcccgtggaagcggaagagcctcctcaggaggatagtagcagtcagtcagactctgtggaggaccggagtgaggatgaggaagatgaacattcagaggaggaagaaacaagtggaagttcagcatcagaggaatctgagtctgaagagtctgaggatgcccaatcacagagccaagcagatgaagaggaggaagatgatgattttggggtggagtacttgcttgccagggatgaagagcagagtgaggcagatgcaggcagtgggcctcctactccagggcccactactctaggtccaaagaaagaaattactgacattgctgcagcagctgaaagtctccagcccaagggttacacgctggccacgacccaggtaaagacgcccattcccctgcttctgcggggccagctccgggagtaccagcacattgggctagactggctggttaccatgtatgagaagaagcttaatggcattcttgctgatgagatggggcttgggaagaccatccagaccatctctctgcttgcccacttggcttgtgagaaaggtaactggggtccccatttaatcattgttcccaccagcgtgatgttgaactgggagatggagttgaaacgttggtgccccagctttaaaatcctcacttactatggagcccagaaagagaggaagctcaagcggcagggctggaccaagcccaatgcctttcatgtgtgtatcacatcttacaagctggtgctgcaggaccaccaggccttccgtcgcaagaactggcgctatctcattctggatgaggcgcagaacatcaagaacttcaagtcacagcgctggcagtcactcctcaacttcaacagccagagacgcctgctcctgacaggaactcccttgcagaacagcctcatggagctgtggtccttgatgcactttttgatgccccatgtcttccagtctcatcgcgagttcaaggagtggttctctaatcccctaactggcatgattgagggcagccaagagtataatgaaggtctagtcaaacgcctccacaaggttttgaggccttttttactgcgccgagttaaggtggatgttgagaagcagatgcccaaaaagtacgagcatgttatccgctgcaggctctccaagcgtcaacgctgtctctatgatgacttcatggcacagaccacaactaaggagacactagccacaggccatttcatgagcgtcatcaacattttgatgcagctgagaaaagtttgcaatcatccaaatctgttcgaccctcgaccggttacctcccctttcatcaccccaggcatctgcttcagcaccgcctctctggtgctaagggccacggatgtccatcccctccagcggatagacatgggtcgatttgaccttattggcctggaaggtcgtgtctctcgatatgaggcagacacatttctgccccggcaccgcctctctcgccgggtactgttagaagtggctactgctcctgaccccccaccccggcccaagccagtcaagatgaaggtcaacaggatgctgcagccagtacctaagcaagaaggccggacagtggtggtggtgaacaacccacgggcgcccctgggccctgtcccagttcgacctcctccaggtcctgagctctcagcccagcccacccctggcccagtcccccaagtgctgccagcatcactgatggtttcagcctcacctgccgggcccccgcttattcctgcatctcggcctcctggccctgtcctcttgcctccactgcagcccaacagtggttctctcccccaggcaggcgaagtggtcagcatcgggcagttagcctcactggcacaacgtccagtggctaatgcagggggaagcaaacctctcaccttccaaatccagggcaacaagctgactttgactggtgcccaggtgcgccagcttgctgtggggcagccccgcccgctgcaaatgccaccaaccatggtgaataatacaggcgtggtgaagattgtagtgagacaagcccctcgggatggactgactcctgttcctccattggccccagcaccccggcctccgagctctgggcttccagctgtgttgaatccacgccccacgttaacccctggccggctacccacacctactctgggtactgctcgagcccccatgcccacacccactctggtgaggcctcttctcaagctggtccacagtccttcacctgaagtcagtgcttcagcccccggagctgcccccttgaccatctcttctcctctccacgtgccatcctcactccctgggccagcctcttctccaatgccaattcccaactcctctccccttgctagtcctgtgtcctctacagtctcagttccattgtcatcttcactccccatctctgtccccaccacacttcctgccccagcctcggctccactcaccatccccatctcagcccccttgactgtttctgcttcgggcccagctctgttgaccagtgtgactccaccattggcacctgttgtcccagcggctcctggacctccctccttggcaccatctggtgcttccccgtcagcatcagccttgactctaggtttggccacagctccatccctgtcttcatctcagacacctggtcaccctctgttgttggctcccacctcttcacatgttccagggttgaactcaaccgtggccccagcatgctcacctgtcctggtgccagcttcggctctggccagtccttttccgtcagcaccaaatccagctccagctcaggcttcccttctggctccagcatcttctgcatctcaggctctagccacccctctggctcctatggcggctccacagacagcaattctggctccttctccagctcctcctctggctcctcttccggtcctggcaccatcgccaggtgctgctcctgtcctggcttcatcacagactccggttccagttatggctccatcgtctactccaggaacctctttagcctcagcttcaccggtaccagctccaacccctgtgttggctccatcatcaactcaaactatgctaccagccccggttccgtcacctctcccgagcccggcttctacgcagacactggccctagccccagctttagcacccactcttggaggctcatctccatctcagacactctctttgggaacggggaacccccagggaccctttccaactcagacattgtcattaactccagcatcatccctggtaccaactccagcccagacactgtctttggcaccaggaccaccactgggtccaactcagacgctgtctctggctccagcaccccctctggctccagcttctccagtgggcccagccccagctcacacgctgactttggctccagcatcgtcatctgcttcactcctggccccagcttcagtgcagacactgaccttgagccctgccccagttcctaccctgggcccggccgcagctcagaccttggcgctggccccagcctccacacagtccccagcttcccaggcatcttcccttgtggtttcggcatctggtgccgctcccttgcctgtcaccatggtatcccggctgcctgtttccaaggatgagcctgacacactgacattgcgctctggtccccccagccctccctccactgctacctcgtttggtggcccccggcctcgacgccagccccccccaccacctcgttcccctttttatctggactccctggaggaaaagcggaagcggcagcggtctgaacgcctggaacggattttccaacttagtgaggctcatggggccctggcacctgtgtatgggactgaagtcctggatttctgtaccctgccccaacctgttgccagccccatcggccctcgttctcctggccccagccaccccaccttttggacttataccgaggctgcccaccgggctgtactgtttccccagcagcgactagaccagctgtcagaaatcattgagaggttcatctttgtcatgcctcctgtggaggcacctcccccttccctgcatgcctgccacccacctccttggctggccccacgtcaggcagccttccaggagcaattggcctctgagctctggccccgggctcgtcctttgcaccgtattgtgtgtaacatgcgcacccagttccctgacttaagactcatccagtatgattgcggaaagttgcagacgttggcagtgctgttgcggcagctcaaggcagagggccaccgagtgctcatcttcacccagatgacccgaatgctggatgtattggagcagtttctcacctaccatggccatctctacctgcgcctggatggatctactagagttgaacagagacaggccttgatggaacggttcaatgcagacaaacgcatattctgcttcatcctttcaactcggagtgggggtgtgggcgtgaacctgacaggagcagacactgttgttttttatgacagcgactggaatcccaccatggatgctcaggcccaggaccgctgtcaccgaattggccagacccgggatgtccacatatataggcttatcagtgaacggacagtggaggagaacatcctaaaaaaggcaaatcagaagagaatgttgggggacatggccattgagggaggcaacttcaccacagcctatttcaaacagcagaccatccgagagctgtttgatatgcccctggaggaaccttctagctcatccgtgccctctgcccctgaagaggaggaagagactgtggccagcaagcagactcatattctggagcaggcattgtgtcgggcagaagatgaagaggatatccgtgcagccacccaggccaaggctgaacaggtggctgagcttgcagaatttaatgagaacgatgggtttcctgctggtgagggagaggaagctggccggcctggggctgaggatgaggagatgtcccgggctgagcaggaaattgctgccctcgtagaacagctgacccccattgagcgctatgccatgaaattcctggaggcctcactggaggaggtgagccgagaggagctcaaacaggcagaagagcaagtggaagctgcccgcaaagacctggaccaagccaaggaggaggtgttccgcctaccccaagaggaggaggaggggccgggggctggggatgagagttcctgtgggactggtggaggcacccaccggcgcagtaaaaaggccaaagcccctgagaggccggggactcgtgtcagtgagcgtcttcgtggagcccgggctgagactcaaggggcaaaccacactcctgtcatatccgcccatcaaactcgcagcaccaccacaccaccccgctgcagtcctgccagggagcgagttcccaggccagcacctaggcctcgacccactccagcttcagctccggctgcaattcctgcccttgttcctgtcccagtttctgccccagtacccatttcagccccaaatccaataaccattctccctgtccatatcttgccttctcctccccctccttcacagattcctccttgttcttctcctgcctgcacccctcctcctgcctgtacccctccaccagctcatacaccgcctccagcccaaacctgtcttgtaactccttcctctcctctcttgcttggtccaccttctgtgcccatctctgcctcagtcactaatctccccttgggcttgaggcctgaggcagagctgtgtgcccaggcattggcatctccagagtccctggagctggcttctgtggccagttcagaaacctcctcactttctcttgtgccccctaaagatctgttgccagttgctgtggagatcctgcctgtgtcagagaagaacctttctctcaccccttctgcacccagcctgaccttggaggctggcagcatccccaatggtcaagagcaggaggcaccagattctgctgaggggaccacccttacagtgctgcctgaaggtgaggagttgcccctgtgtgtgagtgagagcaatggcctggagctcccaccctcagcagcatctgatgagccacttcaggagccactggaggctgacaggacctcggaagagctgacagaggccaagaccccaacctccagcccagagaagccacaggaactcgttacagctgaggttgcagctccatccacctcatcttcagccacttcctcgcctgagggtccttcacctgcccgacctcctcggcgtcgcaccagtgctgatgtggaaattaggggtcaagggactggtcggccaggacaaccaccaggccccaaagtgcttcgaaagctgccaggacggctggtaactgtggtagaggaaaaggaactggtgcggcggcggcggcagcagcggggagctgccagcaccctagtgcctggggtctctgagactagtgccagcccgggaagcccgtctgtccgcagcatgtcagggccagaatcctcccctcccattggtgggccctgtgaagctgctccttcatcctcactgcccactccaccccagcagcccttcattgctcgccgtcacattgagctgggggtgactggtggtggcagccccgagaatggagacggagcactgctcgccatcaccccacctgctgtgaaacgtcggagggggaggccccccaagaagaacaggtctccagcagatgctgggagaggtgtggatgaggcaccctcatccaccttgaagggaaaaaccaatggggctgacccagtccctgggcctgagaccctaattgttgcagatcctgtcctggaaccacagcttattcctgggccccagcctcttggaccccagccagttcacagacccaatcccctcctgtcacctgtggagaaaagaaggcgaggacgaccccctaaagcacgagatttgcccatccctgggaccatttcctctgcaggggatggcaactccgaaagtcggacacagccacccccacacccatcacccctaaccccactcccaccactgctagtttgtcccactgctactgttgccaacactgtcaccactgtcaccatttcaacgtccccacccaaacggaagaggggccgacctcccaagaatcctccatcacctcggcccagccagctccccgtcttggaccgtgacagcacttctgttctcgagagctgtggattggggaggcgacggcaaccccagggccaaggggagagtgagggtagttcctctgatgaggatggaagccgccccctcacccgcctggcccgccttcggcttgaagcagaaggaatgcgaggacggaagagtggagggtccatggtggtggctgtaattcaggatgacctggacttagcagatagcgggccaggcgggttggaattgacaccacctgtggtctcactaaccccaaaactgcgctcgacccggctgcgtccagggtctctagtccccccactagagactgagaagttgcctcgcaaacgagcaggggccccagttggtgggagtcctgggctggcaaagcggggccgcctacagcccccaagtcccctggggcctgagggttcagtagaggagtctgaggctgaagcctcaggtgaggaggaggaaggggatgggaccccacgccgacgtcctggcccccgccggcttgttgggaccaccaaccaaggggaccagcgcatcctgcgcagcagcgcccctccctccctggctggccctgctgttagtcacagaggccgcaaggccaagacgtgagtgggctgcccctccacctaggctttccaccgtggccactccctccatgaccaggcctgactctgttaaccactacttgaagtcttgagggggaaagcctccagggagacataggggccttctcccttcttcccaccaaagtagggggtaggcaactggttgtcatggaaatggggatcatcacagtccccttccccttcaccccacgtggctgggcagtgttaagggtggcaagatagtctctgtccccacccccttgtacttgattccccagctgtctttcacacagccccccacccttaggggaagggggaggggcttctctacaatgaggtttttttcttttttttttttttttaagaagaaaaaataataaacttagtttctgtatgagcatccgcgtaaggaggcttctgattttctggtctggtggagggttgggtgggaacttgggcatcgtttttctcctccctcttgttcttgcaaagatcctagcacctgatctctagcccaggactatatgttccaggcagaaatctacccaagaagagggaagattggtgaatttgatgtggtagggtgcctttccccagtcagtttgaagtcacagatatccttttcctctcatttcttttccctcggttcctagacgttcctcggagctctttgatgcctcagacctttcccttttatccctcttgctcaggtgcttcctttcacaactttttccagagggcaggcgtcctagctccagttgctccatcccttgggccctcccctggctcttcatctagccaaactggtttgagtcagccacaccccttcccagctccctgggctcttcacgtggtggctggccactcaaccccacccctgggcttggcttggagccctgagtcagctccatcaccacccaagccaaaccaaagctgaggcaggagccgaaactcagagtccttcaaggcctatagccaggtgatggaggacgaggagaaggcagtggagatcttgggcaacacggaagctgctcatcctccatcccccatccgctgctgctggctccgcctccgctgcttggcagctactagcattatctgtggctgctcttgcctgggagtcatggctctggtgtttgccatcaaggcggaagagcggcataaagcaggccggtccgaggaggcagtgcgctggggggcccgggcccggaaactcatcctggccagctttgctgtctggcttgctgtcctcattctgggtcccctgctgctgtggttgctctcctacgccatcgctcaggctgagtgaccctggatggcctctgctgagagccagccgagacctcctggatcctgcaatgcggcattgctaaggtcctgtgacagcagtggttggaaggatcctggttggaaggatggggactctctcaaggggctttggaagagctcttctagccctttataaaaggagggcagcagctgagactgatgagaggagggcagcctgctctgttctttcagggccccccacccccatctcccctaccctagcccaccctagggcctctacccagcgggaggggttgaagaccaggcctggttttattagaattcattttgtaataaaagccttttttagtggtg

SEQ ID NO: 112 - DNA, 544 bp, Homo sapiens
  misc_feature (1)..(544): n = a,c,t, or g
ccggtatccattggtagtttatttctttagggttctatcccaaccagtcgcttaaaaaccaagtaacacagacctgaggggtgggggctggggactgcacctccctcctactcatggtggacagcagtggggactagggaggggcaggagaggtggctgaagcaaggcagcagtaatggggccacgacgccacagagccagctccgtcctctcccagaccctggtgggagtccctgtggcttggggtggggagtgggggacccaacccaggcccctccctttcccttcctcagacagccttctttcgggctcaacccatttcttccggcaggagactgaggcacacagagaggaggaagtgggagaggaggacgagggaggggcagggtggcagcacaaatgaaggcagaggtgagaggcgtgggcaaggccactccacccccacacccaccccagagaggggcgaggaagccacaccatcacgcagcatgtcggngggacaaggcggggtttaaggctgaggggcccggggcaggcggngcct

SEQ ID NO: 113 - DNA, 508 bp, Homo sapiens
  misc_feature (1)..(508): n = a,c,t, or g
ctcggctttactgcagcctccgcttcctgggttcaagcgattctcctgcctcagcctcccgagtagctgggactacaggcgcgtgtgccacgccggctaatttttngtatttttagtagagatggagtttcaccatgttacccaggatggtctcaatatcctgagttcatgatccacccaccttggcctcccaaagtgctgggattacaggcgtgacacncacacccagccagttttcctattttctgaattcagaattgacttctctgggaaaactggagatgagaatctgcccagtgctctgctgtccagtcaccgccttttgaattttagttttgggcaccagggagtaccgttagctttccccttctttctggcccatttgactcatcagcacaataggggtcaacacctttaactttttaatttctaantttgttttattgtctttaggggtgtgtatggaaataaaacattgaacagggtttcttggaggccctcaaggtgt

SEQ ID NO: 114 - DNA, 982 bp, Homo sapiens
ttagattcatctttttaatgacatcctaaaattcagaggaggggccagcgggacctctgggctcagcggctgtgaaggagggacccgcaacacccgctaaggcaggtaattgcaagaaggcactcgcgagggggacttcaagcccctcttctatttcttcatataaaatcagggggatggggaaagctccaagggcgagggaagcagagagagtttctctcccagcctatggaataaggaagaggtgaggaaggggcgggtgctgggagcaagaaactgccaagtccaggacctgccctcacacagacacacacagcccgcacctgccctccctctaaaatctgcatccggggctgtaaggaagccccgtgttcaagcccccatctcttctcccttctagctggtacgaattggtaatcgccactctgggtgatgtagcgaacccagggcagggcctggtaaccacttttctcaatgatcttcatgtatcggacctggatcccagagacggtgaagtaggggatctcaaacttgaccccgatggggggccggcctccacctcttccttttccacactggggaggccaaagtgggctcgcatcaagtactccttgccccccggaaagacttaaatactcaaatcacgacgtttctctgcggcacatacttggcgctgcccacactggtcttgaatctgggggagtcggcatcgctgggtacaggcacagattatctcacaccgttggccactgactgtttactaaactgccccttgccttgaccatgaatcccacgcggctgtgggagaactttcaatgacagaatcaatccaattagttggcttagctgggtgctggggcggtatgacatgagcccaaattcacctcaggcgggaagaaaggatagggtgcgtcgttatcaagcagaagaacccgacggcctggtggaatttttaatcttcaactcttaatgatttgttttt

SEQ ID NO: 115 - DNA, 477 bp, Homo sapiens
ttccagagccacattttattccaggatgcgacacggggcggcggatgcctggcctcggaaaccccctccctgcctatgagggcttgtccagggctcccctggaacacagctcagccaggcaaggctgggagagggctgggccccccaggtgacctgcagacgcctcccccacctacatgccccacgcaaggggagccctggagcccggcctgccttgacaggaaggagataggtgaaaaataaatacacggctgggccgcctgcagcaagcgcgacagtgcccgggacccccagggccactcctgcctctggtggcctcaccgcggcccaggccctcgtccccaagggttcagacaccactgtcggcgagcaccgtgctgggcgcagaggccacgtgtggtgggacggcagcctgctggcccctccaggtgaggaccaggagcacaggctgtggcaactccagcccgggcaggggcc

SEQ ID NO: 116 - DNA, 555 bp, Homo sapiens
  misc_feature (1)..(555): n = a,c,t, or g
tgctaagcacggaggctgtttataggctgggccgcatattacaatgctcagggctccactgcaccctctcgggggtctgctagcgctttccgtagactgtctccacgccctccccactcccagccagtccacatcctctccggagggactgcagcaaggatcgttaagtctgtccaccgggatgggggaagaccagggccggagcagattggccatccttcagaagatcgacttccgctattggggagagtctgaggagtccgttctcccacggggcctcgtcactctttgcgaagggcgcctggcaggtcaaatgacctccatttccacctcgccttccaccttcttcttttgcttctccatcactgcctccagctctgacactttctctttgtcctccagcagcgagcgctgcacggtgacctggctgtacacacgtgcccnctnctcggggctcaccgcccgcagcttctccctctgcagcgagaaaagctgcgcnccggtcagcacacccagcgcgtccacggtcccggagctaaagcccttggcctgcag

SEQ ID NO: 117 - DNA, 510 bp, Homo sapiens
  misc_feature (1)..(510): n = a,c,t, or g
tactctnnataccccttctttattaataaattttaggtttagctcaatcatttaccggaaaagagagtttgagaatgttcgagaatctctaccactcggtaaccatgctggctgttatatcagaaaaatccataaacatacacagcagcgagctgttttcacaagacttcctgctaataaacacaacactttctcctccactcagatgggagcctcagatgccaaaacgcagatgtgccaactaactataggctcgttgctaagcagagaaacctatcaagtttgtccagcaaattcgattgtacagtgggatggcgtctgctctgcggccttggacagggagccactggtctgtgctgctgtcccctgaggcaggtcgaagctggtggcccttagagggcaggtaaaatggttctcatgggttagaacataagggctttgagaaaaaatgcaaaaggtctcattgaaattggaggcctatgtgaatctgtttacatggaggcataactg

SEQ ID NO: 118 - DNA, 567 bp, Homo sapiens
aatttataaaatatcctttatttattctaaggaacagtcaagcagtagctttaaaaaaaaaaaaaagacacattttttgaaagatattcttagtgttgtgacctggcattgggcccctgtgagcgggacggtggctgagaccgcctgctgtggctttgcgagttctctgcactcactggcaggggtttggtgggaaacggggaagctttggcatggttctgtccagttgcttataatcaagaataatgagttttgaggtttacaaagagcagaagtaacatttatacggctggcatttgacaaaagattgctgataatatactcattccaggaagtgtaaaaatgctttaaaggaatgataatttgtacttactgtttatggggactagatatattagaattatagcatcattatggggacatagtgtttccctataaattcagaaattctctggttgatgtaaaatcatacttcctggttttacttaattagtaaagaaataaataaattagagtaccatttagtcaggtagagttcccctttttccctccttataataaatttat

SEQ ID NO: 119 - DNA, 1506 bp, Homo sapiens
ggtggagcgcacggggcgggcgcacggccatgtccgccgagggcgcggagccggggccggggtccgggtccgggcccgggccggggccactctgccccgaacacggccaggctctgagctggttctgcggctccgagcgacggcccgtgtgcgccgcctgcgcggggttgggcggtcgctgccgggggcaccgcatccgccgggcggaggagcgcgccgaggagctgcggaacaagattgtggaccagtgtgagaggctgcagttacagagtgctgccatcaccaagtatgtggcggacgtcctgccggggaagaatcaaagagcagtgagcatggccagtgcagcgagggaactggttatccagcggttgagtctggtgaggagtctttgcgagagcgaggagcagcggttactggaacaggtgcatggcgaagaggagcgggcccaccagagcatcctgacacagcgggtgcactgggccgaggcgctgcagaaacttgacaccatccgcactggcctggtgggcatgcttactcacctggatgacctccagctgattcagaaggagcaagagattttcgagaggaccgaagaagcagagggcattttggatccccaggagtcggaaatgttaaactttaatgagaagtgcactcggagcccactactgacccaactctgggcaacggcggttcttgggtctctctcaggcacagaggacatacggatcgatgagaggacagtcagccccttcctgcaattgtcagatgatcgaaagaccctgaccttcagcaccaagaagtcaaaggcctgtgcagatggcccggagcgcttcgaccactggcccaatgccctggctgccacctccttccagaatgggctccatgcctggatggtgaatgtccagaacagttgtgcctataaggtgggcgtggcttcaggccacctgccccgcaagggttctggcagtgactgccgtctgggccacaatgccttctcctgggtcttctctcgctatgatcaggagtttcgtttctcacacaatgggcagcacgagcccctggggctgctgcggggcccagcccagctgggtgtagtgctggacttgcaggttcaggagctgctcttctatgagccagcctccggcatagtgctctgtgcccatcatgtgtccttcccggggcccctcttcccagtctttgctgtggccgatcagaccatttctatcgtccgctgacctctggccacaggaagccaggtccaccgcccaccaccctttcaggccatgtttctactcagtgtgcttttcccaaatgatgtgtgtggtgtttctaagagaaacagggcccataaccagtgggcagctttaggagggatggggatctgtttcagatctaggcataacctgtaaatcacaggtgtccaaacttttggcttccctgggccacatttgaagaagaattttcttgggccacataaaataccctaacgatggctgatgagct

SEQ ID NO: 120 - DNA, 942 bp, Homo sapiens
cgtctttggttatgctagtatcagtcagatgcacttagagtgaagaaacactgtaattacagcacacagattgcaagtattgcgtaccaagtgatacaactcgaaatgcagttctcatcttcctgtttggagcaacatgattattttatcacgcatcagagccttcgtgcttggattatctggtatgttaacaattctagaaaacattcatgaattcacaaaaatacgttactatggcaggggaccattttgtacacatttaagtatataaaaatactaaaatattgtccttttataaccaaagtcacgggtatcttcaggtccagggaactagactaggtcatccgtgtacaatggactggtagttacagtcttaggttaaagtattctaatgaagtatgggaactaaatggctggttttctaagataagatatgggatatgggtcatataacttttatattttcatgaagttgatttgtctggtgtgtcatttaaatggtatcattgaagatgtattttagaccaaaggaattaaattttatatttgtcaaacaagcaacacacaaacacacaaaaaacttttctgacgacgtagagcctcgtgaagaatttacaaaccatctggttggcgcccagagccctatgatgatatgacatgcggcacaaagtggaccaaagaaacctggaaaaaatagtgtgggttccccccaaaaaaaacccgcgcggggccaacaacctgttcttaacaaacccccagggggtcgctgagcgaacacgggggctaaaccagagccaggagcataatagacgacagagccagcatactgtctaacgaaaacaaactgaaacacagcaaacgacgaagacatccacgacagcagaaagcgcaaaagaaaaaaaaagacgagagaagacacaaagaacgacaagagcagcagaa

SEQ ID NO: 121 - DNA, 1335 bp, Homo sapiens
ggagagtgcggggggcggaggctggcagggggcgctggaagctggagcggtccgtgcgctccccgcgcccgagggtgcaggaggctctgaagcggctgctgcaccgcggggcccaggcggcggctggggggctggggggcgctgccgccgccgccgccgggggcgtcgctggcctcggcccctttgttctcgcgcgctccccctcgccgcccactcccctgctgtcgcgcggcggcggcggtggcggcggcggctcctcccgcccgaggcagtcgggctcggcgccgggggcgggagggggcggggggagcacgccagccgccgagagtggggggcgatggcgaagctccgggtggcttacgagtacacggaagccgaggacaagagcatccggctcggcttgtttctcatcatctccggcgtcgtgtcgctcttcatcttcggcttctgctggctgagtcccgcgctgcaggatctgcaagccacggaggccaattgcacggtgctgtcggtgcagcagatcggcgaggtgttcgagtgcaccttcacctgtggcgccgactgcaggggcacctcgcagtacccctgcgtccaggtctacgtgaacaactctgagtccaactctagggcgctgctgcacagcgacgagcaccagctcctgaccaaccccaagtgctcctatatccctccctgtaagagagaaaatcagaagaatttggaaagtgtcatgaattggcaacagtactggaaagatgagattggttcccagccatttacttgctattttaatcaacatcaaagaccagatgatgtgcttctgcatcgcactcatgatgagattgtcctcctgcattgcttcctctggcccctggtgacatttgtggtgggcgttctcattgtggtcctgaccatctgtgccaagagcttggcgatcaaggcggaagccatgaagaagcgcaagttctcttaaaggggaaggaggcttgtagaaagcaaagtacagaagctgtactcatcggcacgcgtccacctgcggaacctgtgtttcctggcgcaggagatggacagggccacgacagggctctgagaggctcatccctcagtggcaacagaaacaggcacaactggaagacttggaacctcaaagcttgtattccatctgctgtagcaatggctaaagggtcaagatcttagctgtatggagtaactatttcagaaaaccctataagaagttcattttctttcaaaagtaacagtatattatttgtacagtgtagtatacaaaccattatgatttatgctacttaaaaatattaaaatagagtggtctgtgtt

SEQ ID NO: 122 - DNA, 554 bp, Homo sapiens
  misc_feature (1)..(554): n = a,c,t, or g
aacttgacatttgctttatcctatataatacaaacataacaaaatacatttaaaatgttgttgaaatatacaaaaatttaatgtaatttttgcgtctgagatgtttaaataagaaacttctttaatcaggtatccctttggactgcaagagcagtttatatcatagctttgcagcataatctttttactctcaggctcttcaagcatttttatcttctttgaaacttctatctaaacaaaaatagtattaaaaaagataacagaaggggttagattctgccaatgaactgtggacatcagtatctcattcttctatttgcctccttattctagtttgaaaaagctttggaacacattattacctatcattattacatatttcttgtagctttagtggttactcccccgactggaaatagaagttgctctttaataagggcccaggggtgcctagggagcaatgcgaggattttttccctacatcncctggggccaaccctataccactaattctggggaaggggatggttataatacaccggccctggaaaggt

SEQ ID NO: 123 - DNA, 943 bp, Homo sapiens
ggcggcggcggcggcactcttgggcgcggtgcgtggtgactgagctacgagcctggcggcgggtgtgcgccgagccccggcccggcccgaccctcgcgtgcctcccaggctccgcacccctgatgctgcgcgggtgctgagccccttcggccgggacgatggtgaagtatttcctgggccagagcgtgctccggagttcctgggaccaagtgttcgccgccttctggcagcggtacccgaatccctatagcaaacatgtcttgacggaagacatagtacaccgggaggtgacccctgaccagaaactgctgtcccggcgactcctgaccaagaccaacaggatgccacgctgggccgagcgactatttcctgccaatgttgctcactcggtgtacgtcctggaggactctattgtggacccacagaatcagaccatgactaccttcacctggaacatcaaccacgcccggctgatggtggtggaggaacgatgtgtttactgtgtgaactctgacaacagtggctggactgaaatccgccgggaagcctgggtctcctctagcttatttggtgtctccagagctgtccaggaatttggtcttgcccggttcaaaagcaacgtgaccaagactatgaagggttttgaatatatcttggctaagctgcaaggcgaggccccttccaaaacacttgttgagacagccaaggaagccaaggagaaggcaaaggagacggcactggcagctacagagaaggccaaggacctcgccagcaaggcggccaccaagaagcagcagcagcagcaacagtttgtgtagccagtctaccaccaccacagcaccccagacagctaggcttagcccctctgccctcccttcattgtactttatcattaaaaatcaacttccagccctgaaaaaaaaaaaaaaaaaaaaaaaaaaaa

SEQ ID NO: 124 - DNA, 1244 bp, Homo sapiens
cagagggtgttagggctgtgtcgtgatgatcactatcatggagtcatttcttgtagggaatagttagagggtaagatcagagataggtacttagttcaagaagactctctgaagctcccaaactgtagatatgtcctgtgtgcgaactggctggctttacagaagtcctgatggaagtgggtttattgttttttgactcgttaccaaccctctgcttactccttcccctcaaaaaagggaagctgacttctcaggttagccagcagctcactcatacttttttctctctctattccattggctgatctgctgacttggggctctgaatctggatactctccatcaccggttggctgctgtcaccatttccttcctcgttgatggcactactagtggtcaagcagaggatgcagatgtacaactcaccataccaccgggtgacagactgtgtacgggcagtgtggcaaaatgaaggggccggggccttttaccgcagctacaccacccagctgaccatgaacgttcctttccaagccattcacttcatgacctatgaattcctgcaggagcactttaacccccagagacggtacaacccaagctcccacgtcctctctggagcttgcgcaggagctgtagctgccgcagccacaaccccactggacgtttgcaaaacactgctcaacacccaggagtccttggctttgaactcacacattacaggacatatcacaggcatggctagtgccttcaggacggtatatcaagtaggtggggtgaccgcctatttccgaggggtgcaggccagagtaatttaccagatcccctccacagccatcgcatggtctgtgtatgagttcttcaaatacctaatcactaaaaggcaagaagagtggagggctggcaagtgaagtagcactgaacgaagccaggggttcagatgacactgctgcatcctggtcacattctctgtctcctggaatgctcccacctcaagtggagttagaaggaaggtagaggggctctcccccaggattttggtgttttgactaacaccagttcctgccaacctctgttgccaccacctttccttccaggccctaagcacgtgcagcaaagcacaccacagcacctttgataacctctctccatcctgggcctgatgacctgctctagactgttatagagggataagcagctcattcccctggttcctaataaaaagcctttaaattaaaaaaaaa

SEQ ID NO: 125 - DNA, 5142 bp, Homo sapiens
gaattcggccgagaggacgagggggagggccagagctgcgcgtgctgctttgcccgagcccgagcccgagcccgagcccgagcccgagcccgagcccgagcccgaacgcaagcctgggagcgcggagcccggctagggactcctcctatttatggagcaggcacccaacatggctgagccccggggccccgtagaccatggagtccagattcgcttcatcacagagccagtgagtggtgcagagatgggcactctacgtcgaggtggacgacgcccagctaaggatgcaagagccagtacctacggggttgctgtgcgtgtgcagggaatcgctgggcagccctttgtggtgctcaacagtggggagaaaggcggtgactcctttggggtccaaatcaagggggccaatgaccaaggggcctcaggagctctgagctcagatttggaactccctgagaacccctactctcaggtcaagggatttcctgccccctcgcagagcagcacatctgatgaggagcctggggcctactggaatggaaagctactccgttcccactcccaggcctcactggcaggccctggcccagtggatcctagtaacagaagcaacagcatgctggagctagccccgaaagtggcttccccaggtagcaccattgacactgctcccctgtcttcagtggactcactcatcaacaagtttgacagtcaacttggaggccaggcccggggtcggactggccgccgaacacggatgctaccccctgaacagcgcaaacggagcaagagcctggacagccgcctcccacgggacacctttgaggaacgggagcgccagtccaccaaccactggacctctagcacaaaatatgacaaccatgtgggcacttcgaagcagccagcccagagccagaacctgagtcctctcagtggctttagccgttctcgtcagactcaggactgggtccttcagagttttgaggagccgcggaggagtgcacaggaccccaccatgctgcagttcaaatcaactccagacctccttcgagaccagcaggaggcagccccaccaggcagtgtggaccatatgaaggccaccatctatggcatcctgagggagggaagctcagaaagtgaaacctctgtgaggaggaaggttagtttggtgctggagaagatgcagcctctagtgatggtttcttctggttctactaaggccgtggcagggcagggtgagcttacccgaaaagtggaggagctacagcgaaagctggatgaagaggtgaagaagcggcagaagctagagccatcccaagttgggctggagcggcagctggaggagaaaacagaagagtgcagccgactgcaggagctgctggagaggaggaagggggaggcccagcagagcaacaaggagctccagaacatgaagcgcctcttggaccagggtgaagatttacgacatgggctggagacccaggtgatggagctgcagaacaagctgaaacatgtccagggtcctgagcctgctaaggaggtgttactgaaggacctgttagagacccgggaacttctggaagaggtcttggaggggaaacagcgagtagaggagcagctgaggctgcgggagcgggagttgacagccctgaagggggccctgaaagaggaggtagcctcccgtgaccaggaggtggaacatgtccggcagcagtaccagcgagacacagagcagctccgcaggagcatgcaagatgcaacccaggaccatgcagtgctggaggccgagaggcagaagatgtcagcccttgtgcgagggctgcagagggagctggaggagacttcagaggagacagggcattggcagagtatgttccagaagaacaaggaggatcttagagccaccaagcaggaactcctgcagctgcgaatggagaaggaggagatggaagaggagcttggagagaagatagaggtcttgcagagggaattagagcaggcccgagctagtgctggagatactcgccaggttgaggtgctcaagaaggagctgctccggacacaggaggagcttaaggaactgcaggcagaacggcagagccaggaggtggctgggcgacaccgggaccgggagttggagaagcagctggcggtcctgagggtcgaggctgatcgaggtcgggagctggaagaacagaacctccagctacaaaagaccctccagcaactgcgacaggactgtgaagaggcttccaaggctaagatggtggccgaggcagaggcaacagtgctggggcagcggcgggccgcagtggagacgacgcttcgggagacccaggaggaaaatgacgaattccgccggcgcatcctgggtttggagcagcagctgaaggagactcgaggtctggtggatggtggggaagcggtggaggcacgactacgggacaagctgcagcggctggaggcagagaaacagcagctggaggaggccctgaatgcgtcccaggaagaggaggggagtctggcagcagccaagcgggcactggaggcacgcctagaggaggctcagcgggggctggcccgcctggggcaggagcagcagacactgaaccgggccctggaggaggaagggaagcagcgggaggtgctccggcgaggcaaggctgagctggaggagcagaagcgtttgctggacaggactgtggaccgactgaacaaggagttggagaagatcggggaggactctaagcaagccctgcagcagctccaggcccagctggaggattataaggaaaaggcccggcgggaggtggcagatgcccagcgccaggccaaggattgggccagtgaggctgagaagacctctggaggactgagccgacttcaggatgagatccagaggctgcggcaggccctgcaggcatcccaggctgagcgggacacagcccggctggacaaagagctactggcccagcgactgcaggggctggagcaagaggcagagaacaagaagcgttcccaggacgacagggcccggcagctgaagggtctcgaggaaaaagtctcacggctggaaacagagttagatgaggagaagaacaccgtggagctgctaacagatcgggtgaatcgtggccgggaccaggtggatcagctgaggacagagctcatgcaggaaaggtctgctcggcaggacctggagtgtgacaaaatctccttggagagacagaacaaggacctgaagacccggttggccagctcagaaggcttccagaagcctagtgccagcctctctcagcttgagtcccagaatcagttgttgcaggagcggctacaggctgaagagagggagaagacagttctgcagtctaccaatcgaaaactggagcggaaagttaaagaactatccatccagattgaagacgagcggcagcatgtcaatgaccagaaagaccagctaagcctgagggtgaaggctttgaagcgtcaggtggatgaagcagaagaggaaattgagcgactggacggcctgaggaagaaggcccagcgtgaggtggaggagcagcatgaggtcaatgaacagctccaggcccggatcaagtctctggagaaggactcctggcgcaaagcttcccgctcagctgctgagtcagctctcaaaaacgaagggctgagctcagatgaggaattcgacagtgtctacgatccctcgtccattgcatcactgcttacggagagcaacctacagaccagctcctgttagctcgtggtcctcaaggactcagaaaccaggctcgaggcctatcccagcaagtgctgctctgctctgcccaccctgggttctgcattcctatgggtgacccaattattcagacctaagacagggaggggtcagagtgatggtgataaaaaaaaaaaaatcatcagcaataagctgatagatggactttccactgtaggagtggacgtttcaagccaactgagccttttcctcaagtgccgacacctccctcatctctcttatagtggaaggatggtcagcattaggctgatggggactgagaaggataggaagggatagaaattgccatgtgtataaagctttattctttagcccttaaccctaaggctcagggaaataccctatgttattgtgctccctggattcctgcaactcattttccttccactctggagcagggtgaggggaatgttatgggtaacagacatgcaggcatggctctacccatttctttgcacaagtatggggcccatgtggtagtccccatacccctccagttcctatatttttgtcttcttcctttcccctctttgccattcctaccttgcatttttcctgtcagtgccttagccaaggcaaggagataaggatgctcttcttgctttttatatctgcacattcatacctctccaaagaccagcttttccccagccagggccctcagccttccctgctgccccagtgattgattgagagagctgttggggtttctctgccaatgacccctgggagagggactttggtagggtcatgataaagtggcgggggtcttggtcctgctcagggttttcatccttcctcctctccctcctctgtgactgtggatatggttataaggtggttgcacctgggagccctgacaactggctgcacaaattccaaaagtaaaggtgtcagtccctgtggccttccttggggcttctctgaccacatgtgcccaacttcaataagagaaccaagggaccttcattttctgaggtgcttggctctgattcagggctttgcaaggggttagaagctgactgtaaaaatgggaagaggcaacggaagacatttatttctcctttggattttggggagaaccaagccctggtagggaagaggtaagggggatgattcacctccatatttcctaagcaggttgtatagggagccggtggcaggaggaaggctgttttcacaaatgacttgtaatgtcgtgattaaaaaaattcctatattcttctgcaaatcaaacgttctttcccaatccaatccagccttggttttattttaaattaaatattaaaattacacatttatattgaaaaaaaaaaaaaaaaaaaaaaaaaaaaaaaaaa

SEQ ID NO: 126 - DNA, 424 bp, Homo sapiens
tttttcaggaggcagcatcagatttatttattcctactcaacatgacccgggaacacaggagcaactctgtacacttctagaaactcacagctagctccaaaacaatagaaattttaaactacaaaagatgagttgtattcagcaaatataaagggtaattttagactgtgtgaacgtttatcagactatttacagcacccgggagacgggttcagatctcgccggcctccttctcttctgacctccgtgaagccatcttcccgttggagctctcaagcctccagtccgggggccctcgctcgctccgcccgctctcccaggactcctctctggatgcccgctctctggagaacctgggaaatgggaaccagaggctcagtggaggctgctgccccccttctgctggccgctcaggcactgacg

SEQ ID NO: 127 - DNA, 2286 bp, Homo sapiens
ggaggcaaacgcacgcgggaagagctgctacccattccagggaccctgccgctgcccctctgaggggtctgcacctcctgggagcaggtgggtctctgggacgagggtccatggtggatggctctggagacgctcccgaggctgtgccgtccccctgctgcacaggtcggagggtcaccgcagaggctactcgggctggggctggggccgagggagcccgcactggagccccatgtggaacccaaggatgcagctgctctgctaacacggcagcccatccttcgagactgtgacctcgccacagtggccctcagccctccacctccggcgggggcgagggccacccacctccaagtctccagccatgacgacctccgcactccggcgccaggtgaagaacatcgtgcacaactactccgaggcagaaatcaaggtgcgcgaggccaccagcaatgacccctggggcccccctagttcgctcatgtccgagatcgctgacctgaccttcaacacagtggccttcaccgaagtcatgggcatgctgtggcggcggctcaatgacagcggcaagaactggcggcacgtgtacaaggctctaacattgctggactacctgctcaagacgggctccgagcgggtggcccaccagtgccgcgagaacctctacaccatccagacactcaaggacttccagtacatcgaccgcgacggcaaggaccagggcgtcaacgtgcgcgagaaggtcaagcaggtgatggccctgctcaaggatgaggagcggctgcggcaggagcgaacccacgccctcaagaccaaggagcgcatggcactggagggcatcggcattggcagtgggcagctgggcttcagccgccgctacggcgaggactacagccgctcccggggctccccgtcctcctacaactgcccggcctcagacgtcaggggaagaggaactgcagctgcagctggccctcgccatgagccgtgaggaggcagagaaggaggtgaggtcctggcagggtgatggctcccccatggccaatggtgcaggggccgtggtccaccatcagcgggacagagagcctgagagagaagagagaaaggaggaggagaagctaaaaaccagccaggttttaggccgaacacagaggccagtggatcctcctgggggccttctgcagacccctggtctccgatcccctcaggaaccgtcctgtcccgaagccagccctgggatccgactcccatgctctcctcctctgagccctggggcaggaccccagtgctgcctgctgggccccccaccacagacccctgggccctgaactctccccaccacaaactccccagcactggggctgacccttggggagcctccctggagacctccgacacacctggtggtgcctcgacctttgacccatttgccaaacctccagaatccacagagaccaaggaggggctggagcaggccctgccctctgggaagcccagcagccctgtggagctggacctgtttggagaccccagccccagttccaagcaaaatggcacgaaggagccagatgccctggacctgggcatactaggggaagcactaacccagccaagcaaagaggcccgagcttgccggactcccgagtccttcctgggtccctcagcttcctccttggtcaaccttgactcgttggtcaaggcaccccaggttgcaaagacccggaaccccttcctgacaggtctcagcgctccgtcccccaccaacccgttcggcgcgggcgagacgggcaggccgacgctaaaccagatgcgcaccggctcgccggcgctgggcctggcaggcgggcctgtgggggcgcccctgggctccatgacctacagcgcctctctgcccctcccgctcagcagcgtgccagctggcttgaccctccccgcctcggttagcgtcttcccgcaggccggagccttcgcaccgcagccgctgctgcccacgccgagctcagccgggccgcggcccccgcccccgcagaccggcaccaaccccttcctctgagccccgccccgtcccataccggcctgcgcctgcgccggacgctccgcggccccgcctccggacccggggctgggcggggcgccggtgctagtggaacgccgagccagtggcggctggtatcccgcggcggctctggaagctggacgcggaccacggcccgggagctagaaactgaacgcccgcataataaagactggaaccctcgttaaaaaaaaaaaaaaaaaaaaaaaaaa

SEQ ID NO: 128 - DNA, 1191 bp, Homo sapiens
cgaggcggcggcggcggcggcagctgcttgggcgcggtgcggtggtgactgagctacgagcctggcggcgggtgtgcgccgagccccggcccggcccggccctcgcgtgcctcccaggctccgcacccctgatgctgcgcgggtgctgagcccgcttcggccgggacgatggtgaagtatttcctgggccagagcgtgctccggagttcctgggaccaagtgttcgccgccttctggcagcggtacccgaatccctatagcaaacatgtcttgacggaagacatagtacaccgggaggtgacccctgaccagaaactgctgtcccggcgactcctgaccaagaccaacaggatgccacgctgggccgagcgactatttcctgccaatgttgctcactcggtgtacgtcctggaggactctattgtggacccacagaatcagaccatgactaccttcacctggaacatcaaccacgcccggctgatggtggtggaggaacgatgtgtttactgtgtgaactctgacaacagtggctggactgaaatccgccgggaagcctgggtctcctctagcttatttggtgtctccagaactgtccaggaatttggtcttgcccggttcaaaagcaacgtgaccaagactatgaagggttttgaatatatcttggctaagctgcaagccaaggaagccaaggagaaggcaaaggagacggcactggcagctacagagaaggccaaggacctcgccagcaaggcggccaccaagaagcagcagcagcagcaacagtttgtgtagccagtctaccaccaccacagcaccccagacagctaggcttagcccctctgccctcccttcattgtactttatcattaaaaatcaacttccagccctgtctgctgtctacgtggtgggttgtggggatgcagtttggcatctgcagtacaccaagcacatgattcatgtctgagccaggtctgcttattctcccattgggcagctgaggaccgaggcacagaggtgcggtgacttgcccggggctccaggtagcctgcaggttaactggcggtaagtgctagactgtaagcccgacaagggcagggcttttggttttgttctctgatgtgtctcagtatctagcacataatagacactcaataaatacttgttgaattcaaaaaaaaaaaaaaaaaa

SEQ ID NO: 129 - DNA, 1853 bp, Homo sapiens
tgtgtctctcccgaccatggagggggtcgcggtggtgacggcgggcagcgtaggcgctgccaaaaccgagggagctgcagccttgccgcctccgcctccgcctcctgtctccccgcccgccctcacccctgcacccgcagcgggtgaggagggaccggcgcctctgtctgagacgggggctcccggctgctccggctcccggccccctgagctggagccggagcgcagcctgggccgcttcagaggccgcttcgaggacgaggacgaggagttggaagaagaagaggagctggaggaggaagaagaggaggaggaggaggacatgagtcacttctcgttgaggctggagggaggccggcaggactcggaggacgaggaggagcgcctgattaatctctctgagctgaccccatacatcttgtgttccatttgcaaaggttacttaatagatgcaactaccatcacagaatgtcttcataccttttgtaaaagctgcatcgtaagacatttttactacagcaacagatgtccaaaatgcaatatagtagtacatcagacacaacctctttataacataaggttggaccgacagttacaagacatagtgtacaaattagtgatcaatctagaggaaagagaaaaaaagcaaatgcatgatttctataaagaaagaggtctagaagtacctaaacctgctgttccacagccagtcccttcaagcaaaggaagatctaaaaaagtcctagaatcagtgtttcgtattccacctgaacttgatatgtctttattactggagttcattggtgctaatgaaggcacgggacattttaagccattggaaaagaagtttgttcgagtttcaggagaagcaactattggacatgtagaaaaattcctcagaagaaaaatgggtcttgatccagcttgtcaggtagatataatctgtggtgatcacctgttggagcagtatcaaactctaagggaaatccgacgtgcaataggtgatgcagcaatgcaggatggtctgcttgtccttcattatggtcttgtggtttctcctctgaagataacttgaagattctaggcacattatgaggagggaaacaaaggaggcttctgcaggactgcatctcaccaaagatttccatgaaatgtaattgctaccactttgctgttcaagacataacttacctatttttagcaccaagaattatagcgtttataagtacaacttggaacgatggaatgcatctgttactagagactgtatataaaaagcagccaaagctcaggggaaatttttcaaaaattgaattttaaaatttcttatgattttaaataccttgacattgattttgcttcccatctttgaagtaattggttagttttctttgttcagccatttcaagttggtggttgggatatctgctctctgggatggcatcagttgggcagtcatctttttggaagagaagtgtgcttttgagtggaagattcaaagccagtctttgttaaactgcagggtgtactctcaaagaccaaaactattggccacttttgtatgttgccagcatattttgaacttgtacctttttttatactagcaacactacaaaggagaagttactcatttcaaaatggatgaattgttattatgtgtgaagagactctgattttatgatctgtgccataaaatttcagtgtaataagacttcttcaatacatcttccaataaggggtgcttctttgtgacagtatttttatttctgacattcattttatttgggtacatagtgtggttgttgataccttgcaacagtattgcttctgaaagtaataaaaaattttaggag

SEQ ID NO: 130 - DNA, 805 bp, Homo sapiens
  misc_feature (1)..(805): n = a,c,t, or g
tggcgtctgggatgtactttattggacaagtggtggcccaagtcttggtctggaagcactggggccctggaccaggcactgagtttgaggaggcccagagttcagggctgtttggagcgaggccacaagcggctggtgagggagccaaggaagaggttctgcttgttggacttggagagctcggccaggcgctgctgctcctcctgctctagccggctttggcctgtttgaaagccgccagcgggtcatcctccagggcatagtgctccagcagggttcgcacgtcctccacaccattcagtgcaatggtcttgaggaaggcagacagatccaacaagacccggtcatcagagttgccgtcccagggccgcagggcaacgccgttatagggctgcaggcggaaggcttccttcttgcagtccacaactactactcgagctgggtcccgattcagacatgaaatatcctttacatggtgtccatccatgtatcttgtggcgtcccggaataggcggtaggagatgaagccatgggggtccacactatcaatgagtggaaacgcagtcatgccagtctctgacgtaaagatgacaatttcatataaaggggcagctgctggaacaggtctcgatgcctggcgcttcttanacctccagcagtgccagcaaccactcaggatgcagaggacgcggtgagctcaaaacgagcgtgtagggtggcttgtagtacggttctgcagagggtctgggagaaggcaagggctggtgggctcgatgatcatctgtctcatatctttgaaaatatt

SEQ ID NO: 131 - DNA, 1070 bp, Homo sapiens
attaatctatttaatttttttttttcagtttgtattttttattttacaataaaaagtcaaaaaaaataagcaaaaagataaactggaaaataagayttacatctcatatatatggacaaaggaccaattacctccaaacataaacagctcctagaaattactgcaaagatcaacaacccagtagaaaaatgaatgaagttcccagaacagaaaacacaagtggcccttcaaaaaaatgaagagaggctcagcctcttatggtaagacaaagagacaggattttaaaaacctaggcctcttcctagagttcccttaaatatctaggccagatcatttttacttcctggcttagaccctgccaagggctgcccagctactcaggtgtttgtgtacttgtggactcaagtyatattgtcctgatcttctggctgagtacggttttctcctccagcaaagacaatttggaggatgtactaagcatgaagcgctacttcctggcccccatctctcttcgcacagtgttccatcatccagccatgaaagcacagctgagtgatccaagaggcagttccaattgttgactaacgtgtacctgcctatgtgagtgtgttctatgggaactcaggccttagaatggtttcaaagtagtggctttcaaaattactgtttgcctcttcaaacttcacacctaaggaaaatggaaacatgcagagcagggacacagaaggggcattagctggcgtggggtaggggcaagagctaattgtgaaggaagaaggcctgagatcacgtagccatgtcggagaacagctgtgctcgctgccctgcctctttgcgcgcatgttaggcagccccaggctccagctgcttgagtttctcttggagtgcccggagctggcttcgaccccagttaatgcggttctggaaaaaaaaaawatwtrcggscagctgcaggscatcccggaagcttgcttgagcttgaggtgactgttaggactwgggttccaaccmgttcagggggtctgaggggctaaaagrctcsgktctggggttaatgggccytkccctcc

SEQ ID NO: 132 - DNA, 840 bp, Homo sapiens
cgcgggccgcagggcatggaccttcaggccgccggggcccaggcgcagggggccgcggagccgtctcggggcccgccgctgcctagcgcgcggggggcgccccccagcccggaggctggctttgctacagctgaccactccggtcaggagagagagactgagaaggctatggatcgactagcccgtggaacacagagcattcctaatgacagtcctgcccggggtgagggcacccattctgaagaggaaggctttgccatggatgaggaggactctgatggagaactgaatacctgggagctgtcagaagggacaaactgtccacccaaggaacagcctggcgatctttttaatgaggactgggactcggagttgaaagcagatcaagggaatccatatgatgctgacgacatccaggagagcatttctcaagagcttaaaccttgggtgtgctgtgccccacaaggagacatgatctatgaccccagctggcaccatccgcctccactgataccctattattccaagatggtctttgaaacaggacagtttgacgatgctgaagattgagtgtggagctttctgccttgtaggtgggcgggcctccacgtcaagatctcttttcctgtcttggaggtgaaaagtcatatctgagaaaatgtttgcagtgacccctagtctggggtacacagaccagtgttccttattgacagtgttcaataaggccccgtcattctcgccagtctgttgttgttcttaatgggctcctccttgaaatgtgtgtgtgtttgtgtcaagaggagttgtgttctttgtaaataaaggttaaaaagagaaacc

SEQ ID NO: 133 - DNA, 1187 bp, Homo sapiens
cggacgcgtgggtcgacccacgcgtcgcgttgaaggacaccagctgcggaatttgcggctgtggcagatggaaatcatggcaggtccagaaagtgatgcgcaataccagttcacgtggtattaaaaaatatttcaactcttatactctcacaggtagaatgaactgtgtactggccacatatggaagcattgcattgatggtcttatatttcaacgttaagggtccaaaaaaactccagctgtgaaagcaacataaatggattttaaactggtctacggttcttaacctcatctgttaagttcccattgcctggagaagctaagtgccaagctcatcatgtgactacttcaattggtacaataaattatgaacctggaacaacaaaaaaacaacacaaaaaccaacaaacaccacaccaacacaaaaacaaagcaaaaaaaaaaaaacacacaacagcgggcgaacaaaacaagaactaccgcggggcgccccacacagaaaacgcacaccgaccctctccccaaaaagcaccccccaaaacacaaggacaccaccccaacaccacccaccccgaccagcaaccgcacacccacacacaaacaacgcgaacacgaaacaacccacaacaccaccacaaccacacgacaccaacacaaccacacaacaccacgagcgccaccacacaaaacgcgccgaaacacacacaccacacccccacaccccccccccacacgccccacaccacacacacacccaccagcaacaacacgcgcgcaaaaacaaaacgacaaacccaccaccagcgcgaccagacgaccaccgcccacccccggcccacccgacaagcaaacaccacaatcaaacccgaggcaggcaccagaaaaacaacacagacaaccccccacaaccaccacaaccactaccaccacgcgcagcacccaccaacacaacacgcacgagcgcccgcaagacaaagcgccacgagcccccagagcaacaagaggacggagagcagagaagacacgcgaagacaacaacaaacaaaagcgacaccgcaacacgagacgcaaccgcagacccaccgccgcgccaccgcagccgaaccagcagcgaacacagcgcagaaaccaacacacacaagcgaaagcccgcacacgcaggagaggagaagaggaaagcagaacaa

SEQ ID NO: 134 - DNA, 569 bp, Homo sapiens
ttttttgcaagatttaattcttcctttaatataaataaggcagcatgaaacaccaagagccccactgctttctgctttagaagcagctttggtgcagaaaagattcccgtttccccaccgagttctgttgtctctgtacacacaagaagccagaagatatttttttttcagtgaactttctcctggaagcaaaggagaagctatgggagatccaggcatggttttggcttctggaggctgttttttggttactggggtctcttcaaagcaaaacgggatcaggatgaagagggggaaaggcatgggccataaataaataaggaaatttgccccgattctacaaatgcatctgatggaatgaggagggtcaggctgtgagggattgggggtagctccaggctgctgttagggacacacttgagctggttcattccctggagtgccccgcaactgcgtctagggagaggcaggcccaagcacatgttcagtctaattccagctcacactggaaggcttcctataggtttggttgccctgatcacagccgagctgccccaccaggaattaac

SEQ ID NO: 135 - DNA, 596 bp, Homo sapiens
ttataaagacagctataaagacagcactttccgcacacaaagtgtattttacaaaccttttttatacaaattaatgagctctactttatttaagtgttcatggaatgatgtaaattttaggtccagttgaacaaatattgagtgcctatcatatgcaagactaactccttactaggaatgaaatcacacagtgtcttctgtttgcagtatgtgaactttatgtttgaaaagaaattattatatttaaatttttttgttgtcagagtttatcattgtatactgtaacccagtaaattttgcattcagttttaaaaaatgaagatgtaacttacctgagtctcatttttgaaaatgaaattctgcaaaaattatttaaaaattagttcttggggaaattgattttcaagattcaagtgtataaaaacttatattgaacttttcagcctcgtttttaattagctgatgttaatgataagatacataatacatgtatcttgttgctgaaaatattttttgcatttcaacacattgagttaaaataaagttgttactacttattcaagattaaaaaaaagaaagaaaaaaataaaaaaaga

SEQ ID NO: 136 - DNA, 583 bp, Homo sapiens
  misc_feature (1)..(583): n = a,c,t, or g
cacgaggcgcaaangactttttttttttttttttttttttcactagacaaaaatctatttttaattgtataaaattatacatataaaatacatagaatgtactaagaagatgagtaaaatctttgacaccagaagtggacagatcaggaaacaatttttctcaagttatttgggatcttactggttggtatttgagaaaaataataaatccaggaggtacgagggcaattcttcccacaactcacaccccttaatccacacgtcccagagaaaggagaaacaggagtgttgatgagtgccagcttataaatgtcaaacagacacacctggtgtgtctagctgtttttgcctttactccaacccgacgtgtttcatggaatacaaacatggggcttctaccccagctctcttctgattagtaagaaaaaaaaaatgatagggcctggagaattcaaggaagcccgtttcaagcactaataaaattgtagctggattccttacctcttacccaacatgatttcaaaagcaagaaagttgcctttcatcttgcccctatcaaatccaaaagagccaattatagcct

SEQ ID NO: 137 - DNA, 672 bp, Homo sapiens
  misc_feature (1)..(672): n = a,c,t, or g
gctggccggcgtcacgagaccacatccagcattgccagcctcatctgacggagccagagccgtccttcttctcacagcggcctcagcgtccccagagccgagccagggtgtgagtgcatgtgaacgttgagtacacatgagtgcgtgtatgcccccaggctgggtcagctcttctgtggattgcatggcgtgtgattaaaagcccatgtgttcccacacatccacatcatgggaaggctaatgtgtgcctccttggaactgggtgttggtgtccatggaacttcctctctgtatctcatgtcagtaggcgcagaaacgcctcatgatgaagattcttgagccccatttacaagacccctcacatccaatcctgtcctgtaacatccatcaaggatttccataggggtgactggtgcccacccaagactgcaccagtgcctgctcattgaagagagtaactgctggccaggcagaaagaatatgggctctgcaatgagacagacctggaggggactctaccgttgagcactagcagctggaggagtggggagttcatggctatcatggttgtgataatcgattgtggngatgaaatgtcattgtgtatggaacgcggngctcattgctgattggcaataaaatggcggctgccgttgcatcggcaaaagggga

SEQ ID NO: 138 - DNA, 615 bp, Homo sapiens
tttttttttttttttttttttttttttttttttttttttttttttttttactaacagtgtttttatttacaaataattgtttttattaggccatttggaaaaccactaacattttttattttagaaaacattaaataataaacaagatgttatacagtactttggataacttcttccatcagtttagtgcaatgtatcattggcatcgaaaagtaaaattttcatttattttcccctttcatcttcagctgtgcagttatatgaccataaaggaaatgaaccattaaaaatggatctacagccatatattctgccgttactcaaaggcttaatgatttattttccccctccagccctgcctttaccaggttaaatgacagaagaccttctattgtacctattgttcaaaaaatattactgttctgtggaacctgggagagtccaattgataagagaaactgaatcatactgatgaggtgaaggaaaggtctgccggtgtggggcagggcactctttctcagcagccaagataacttgtcacacacgaagcagagagaatgccccgatgaaaatctctctgaactgtgttccttgaaggatctcttaaaaaaaaaa

SEQ ID NO: 139 - DNA, 469 bp, Homo sapiens
gaaaagaaaatcccaaagcaaatttgtgctagggttctttgaacttggctcttttacctcatggttgaagatcttgaaagaagtatgtaggataccactgggtgatgtacttgtcaaggccctgaaaagtagcctaccatgccattctcccccactctcaagtagcacttttatgttatgggaatcaaggggtgggaggtatcattattcctggtagttatgggtttttaataaatatcattactgcaatatcagacttcaatcttgccagaacttcaaaaaacattattcaatttttgtcttacgaaacacttaaaaaaaaagactatcacttgagaattttctttgcaatttcctgtaaatgaaaacatttgttaaaaagttcatctatgaaaagttctcacatatcttaaaaaaaaaattcttctgtacacttgttcccataattatgttgaaattaatggaaaat

SEQ ID NO: 140 - DNA, 490 bp, Homo sapiens
  misc_feature (1)..(490): n = a,c,t, or g
ttttgctgatttaaacaaaaatatttactcttttcattagcaaaacattatttaaaatatatctatttctcccctctgaacatttaactaggaacactgggcaatttttgaaggtttagtgctgattgtttaatacaataaatatggctgtggagagcacacagcagcagtagcttacatacgtccacggataagaaatttactctcatctggttagtgtccagtccaccaaaggaaaggtttggcattcgtgtgcttttttttcgtgtaggaatcaattctgcttgattttcattcttggaagaaaaaataatcagctgatatcctcaaattttatgacatgatgcaaaggagcaaggggacaaagatgacctatggtcaaaaagctggactgggatcaggtctccaggcagatcttccttcttgcgaggtgagtctacaaagggctgcactagaagccaggagtgaggcattggggacacnggggtgg

SEQ ID NO: 141 - DNA, 730 bp, Homo sapiens
  misc_feature (1)..(730): n = a,c,t, or g
agccttaaagagatgaaataaattaagcagtagatccaggatgcaaaatcctcccaattcctgtgcatgtgctcttattgtaaggtgccaagaaaaactgatttaagttacagcccttgtttaaggggcactgtttcttgtttttgcactgaatcaagtctaaccccaacagccacatcctcctatacctagacatctcatctcaggaagtggtggtgggggtagtcagaaggaaaaataactggacatctttgtgtaaaccataatccacatgtgccgtaaatgatcttcactccttatccgagggcaaattcacaaggatccccaagatccacttttagaagccattctcatccagcagtgagaagcttccaggtaggacagaaaaaagatccagcttcagctgcacacctctgtccccttggatggggaactaagggaaaacgtctgttgtatcactgaagttttttgttttgtttttatacgtgtctgaataaaaatgccaaagttttaaaaaaaaaaaaaaaaaaaaaaaaaaaaacatgttcgccgcctcggcccagtcgactctagacttcgagcaagcttatgcatgcggccgcaattcgagctcacttggccaanttggccctatagtgagtcgtaatacaattcaattgcccgtcgtttttacaacgtcntggcttgggaaaacccttggcgtaacccaaatttaatcgcctttgcagaa

SEQ ID NO: 142 - DNA, 568 bp, Homo sapiens
  misc_feature (1)..(568): n = a,c,t, or g
agcttgtgaattattttactttcaaaaaatatgtaagttagaattgtaattctaaaggcactgtcgtttgcttacacattctaacatatttctaataagaaagtacctgctttcttaagagaaaaagggataagttaccaaaagcagcacgttctcctgggctcataccccggattcatccatgaggccacttccattgtaaagcttttagcatctcttgatttctcttcacactgaggcacaaaggcctgctacttataggcattacttcatttttccttatgaagggtactataccaacacagactttatagtatgtttaaaaatcccaactgcaagatacacaggatgctgtaggcctgatttcctgttgtagaacctncagccctgtgttgaatgaagaggtgcanatatatagacccttaagatcagaccacagcaggcattcangtggaggggatgaactccattcattccagctgtgcagtgggacatctgcgccctccgcatctncgctcattnctcatctgagccactcaagagggcngnnctgtagtgtcatctgaat

SEQ ID NO: 143 - DNA, 445 bp, Homo sapiens
  misc_feature (1)..(445): n = a,c,t, or g
tttgttgtttaaaagcaaggcatgcttgtcggatgactctgtaacagactaattggaattgttgaagctgctccctggttccactctggagagtaatctgggacatcttagtgttttgttttgtttttttccctcctcttttttttgggggggagtgtgtgtggggtttgttttttagtcttgtttttttaattcattaaccagtgncaanggttagcccttaaggggaaggaggacggattgattccacattccacttcctagatctagtttagaaaacatgttccccatctggtgctcttaggaaggagtatagtaaatgcctcatttaataacatactccntttttgaaaagttgccnttttctctccacccctgagtaagatccagtaatttgatggaacnccagaaagtggggtggaagccaatcntggccccgcccctt

SEQ ID NO: 144 - DNA, 701 bp, Homo sapiens
  misc_feature (1)..(701): n = a,c,t, or g
tttcagcaacctcggctgtatttattgatacaaggaagatcacccgagagtcagggacgtggcggcgaggggccctggaaatctccagataccaaagctggaagggcgtggagtcttctccagttctcctagtttacagatgttgtgacctaggcttacaatgggcctggggtctgaaagcgggacgtgggctgcgggggttaaagagccggtttggtggaggtcagcgccacagcgcgccgngccaggaagactttattctgcgcctccgtctgtctctgacgtttgagctcagagatgaggcgtccgtaggagttagccagagccacagtgtacgccatcaggatgctggagatcagcagaaggggcacagcaaaagcctgggtccccaggaagaagaggaaattctgggtggtctcagggaggctggaaatagactcagggatctgggcccanatggacgactgcccccggaatggaccacacagcttagaaggcgggatcaggaagatgctgtaaagcaggggaacgctggagatggccagacccaggagaaggaccaaggggaaaaagaaattcgccgcggaagcccggaaggtgcgggcagccgggggacaggtggagaaaaaggtaagctttctcaggtaaaaagcagcagggacttgaccgtgttaagccagggcagtaaggggccgaaaaaa

SEQ ID NO: 145 - DNA, 2098 bp, Homo sapiens
acagattgctagaactactttatgcatgaaaaaagtctgtttcactgatatgaaatgttaatgcactatttaatttttttctctttgttgcttcaaaatgaggttggtttaagataataataggacatctgcagataagtcatcctctacatgaaggtgacagactgttggcagtttcaaaataatcaagaagagaaatatccttagcaaagagatgactttggggatcatttgaggaatactaactctgttgcattaatgcttcaaaaaatcatcaaatgattcatgggggcctgattcgcatttgaaaaatgtctgaaattagagtctcatttgtttcaggaatgcagctacctgagttttttgtctcggcaaagtcacaaagcccatatactcacattgtgtgtctatacttgccaattaattctaaacttgtaggaaatatgccctctcttaaaggagaattttttttaaatctctgagaaatgagattctgagtttatttcagctaaaaggttgcaattcttctgaagatatctcaaatataaggttgaaagttaagtgttaataatttttgtgaatttatacacacctaaacgttaagtacacaaatattttatttgttttacaaataaggaataagtaatttataaattaagaagttacctataaaaataaaaagataacaaccctatcatatagcttatttttaaattacctgaaaaacgatattctacactgtttcctttttgactctgagttttcaaactgttacttctcccatatttctcaatccatttcactcagttgcacagtcttttaaaccctgtaattgtcataccaaagtttctttttaaaaaaaaattactttaaatgcttagtttattcaaagagcgatccaataatataaaaggaacatgtgttcaacacaataaaattttaaatggctctaaatcaagcacatcaagagtatacaagtcttaaaggctttttaatacatactcttttcccatctatgtaacccaacttgcacatttcagctgcatgtggtgaatatgcatcatatatttactttaagaggtaagattttacttgcaaaatacatgtgcaaattaggatccatcagttgatggaagagatggactctagaatattatttcttgtggttattactcctttacaaagcactttcgtctcacttgatcctcataaggaaactaaggctcagaatgagtagagctgggttcagaatctagctcttctaactccaagccatctcctctttccactgcaggaaactgcctcttttgtcagtgaaataatagaaagattgtgttagttaagtgataactgtcatttgtttgaaaatgttcgagactgaacaaatagcatttaaactgctggcatatagatgagatattgtacttttgtgcaatgtttattacctttgattaaattgtaatgtgaagcttttactaggtgaatagttcattatgtagtggaggcttcgtggttgtccattgaattgtcacagcaaaatctataagtttcttcaattctacaagatagatccatatacctttgatcacttggagactctttttttgctggtttctagataactcaggtaaatcagacctttacagagtacagggctaggtgaaagaattactgaaaaatcaccttgaaaatccgaagggctgatataccctttatgttcctgactgatgcgcagaacctgggggaaatctacagcaatatacaggttgcaatgctgataacacaacagcaatcctctcctctacgtggacttactgttgtttttttaattattattggaatgggattttagaaaatagaagttacctttgtgtgtgttttagggaaggtagagaagaatctgctctttctctgaatactgttttgaccccaggcaggaccttggaaaggccaaaacattaacagtagtacttctgttcactgaagagttatgttacatgaagataaaatggttttgtcgtgtttattaatgtattttgtgttgatataaataaacatggtaatgaaaccaatgaaaaaaaaaaaaaaaaaaaaaaaa

SEQ ID NO: 146 - DNA, 126259 bp, Homo sapiens
gaaaggagaaaggagccaaggagggagggaggttcccttaaagactctttcggaagtcacatacaatcttcttgttgatgttccattggctaaacttgatcacatcactacactaagctacaaaggaggctgagaaatatgatctgtgttctaggcaccatgtgtccagatgaaaattgaggctcttatttcaaagaaaaagttcagtccatggccaggcgtggtggctcatacctgtaatcccagcactttgggaggccgaggctagtggatcacctgaggtcaggagttcgagaccagcctgggtaacatggaaaaaccccgtctctactaaaaatacaaaaattagccgggtgtggtggcatgtgcctgtagtcccagctgctcaggaggctgaggcaggaaaattgcttgaatttgggaggcacaggttgcagtgagctgagatcacgccactgcactccagcctgggtgacagagcagaactctgtctcaaaaaaaaaagtatcagaaaaagcgcagtctggatattgggaaatgaccatcagtctatgcatgctcaggagttccatgtctagcagtgtgtcctataggtttgcttaacccatgtgacatttgacacgtttacaaggttattcactgcagcattgtgacagcaaaagactggaaacaacctaagtgtcctgtaataggggactggttaaacaaattatgggacatttatacaatggagaatgatggccacaaacacacatgaggaaactctcaatgcagtgatatgaaatggtatttaagatgtttcactttggaaaacagtttggcagtttcttatagagttaaacatacatctctcctatgacccagcaagttcacctctaggtttttgctcaaaataaaaatatatatgtatatatagctccacaaggacttctatgcaaatgttcaacagagtttaacatgtgatagacaacaattggaagtgacccaagatcgaacagccaatgaatggataaactggtgagtcaaatattacactggagtttaaatgagtgatccaatgtctgcaaccacatggatgaatctcaaaacatgctgaatgaaaacaagctggatacaaaaaatagcatgttgtaatgatgccgtttatatgaaattctagaagaggcaaaacagaccaatctatgatgacagaaagcagagcagtggctgcctctggggtggagggatggactgggaaggagcataaaagaatttcttgggatgctggaaatgttctgtatcatgattggggtgttgattacacaggtgcatttcactgcatgtaaattataccttgatatttttaaaaagcagggtgcagaacaatgtttaaattatggaatccggtatgtttaaaaagcaaggaaatttgcttgtatctgcattgactgtctagaagagacttgtaatagtgattgtcggtgggagaggaactgggtagctgggggctggggaaaagggacactttgggccataccctgttatacctgttgaatcttaaaccagttgaatgtactacctaattaaaaactaaaactgaaaagatcagttagatgcacacgtgacatcaccacattcatgttttaaatctcctaatggctcttcccggcaatctggacgaagttcagactctgagctgtcctggccttatgtggccccactcaggcagcatcctctccaaccacttttctgttccctgcagagacagctcagtgcctggctccctctggttggcctaagtgcatatgtgccattccctgagtgctcagctcctcggtgaattctccccagccccctgcctgagttggtccctcgggtctcactggacctgctgcactttgccttcccccttcctcatctatcagatcaacacgtgtttcccagagctctctgtgagctggaccccagagtcctggagatgtgtgggagccacttttatgggggaacctgcttccttgtttctgcttcagacagcaggcttctcctgccctgagactcccagcagcgtctcctcttcccaggcccagatctggcctggggtagaaactttgataaaatgtgctgtctttaagttaaatatggctccataaagaatgcattccatgacaagaaccaacagagccctggtttcttagaagatacagagaaaacacactgttgtgggagaattgtgtctgccaaaaagatacatcccagctctaaccctgggacctgtgattgtgaccttatttggaaacagggtttaggcagatgtagtcaggtcagggtgaggtaatactggattagagtgggctactccaatgactggtgcccttaaagagggaaacagacagaggagaacaccacgtgaccacagaggcgaagatgggagtgatgcatccacaagccaaagaaggccaaggaggcttgcagtcataaaagctggggagaagcgaggaagtgtcctcccttagggctttcagagagagcatggccttgccagcaccttgatttcagacttttagcctccagcactgtgagaatacatttcagttgtcttaacctacctggtttgtggttatttgttctttttttaaattttttatttatttatttatttttgagacagagtctcactctgtcacccaggctggagtgcaatggtgtgatcttggctcagtgtgacttccaccttctgagttcaagtgattctcctgcctcaggctctggagtagctgggattacaggcacctgccaccacacctggctaatttttgtattttcaatagagacgtggttccactgggttggccaggctggttttgaactcctggtctcaactgatccgcctgtcttggcctcccaaagtgctgagatcacaggcatgagctaccgcacctggcctgtggttgttaactgtagtcccaggaaatgaatacacacacaaaaccagttaatacctaagacaattccagctagtggcaagtgctttggaaaaacaaaacaaaacaaaacaaaacaaaacaggtgagaagggcgtgggatagagagggactgggaacggtgccacattagccagggtggtcagggaagccctcttggaggaggaggcatttcagtggagaggagaagcccagcatgtgaggaccaggcagaggtgctggtgagggggcacttggtgggcgtgaaagctactggatgcagctctgacgatggaggatacctgactgggattttggaggaagtctccaggaatgaaccgggaaggggctatcctctctttgcctctgcaggtctcagaacctgctgcatggctgctgcaggctgtccctcggcctaggccggctggcagccgatgaaggaggccagcctcgcagctgacatgctgctctctaattgtgattaactaccaagtcctctcctgctccggcctgaggccgctggtgtgacagctgcagagtgaatcaatgaggccaggaaggggttaatgggcagcccctccatctgagcccttcagacaataaggggaggtggggaggcctctggtgggggtgtgtggcatcagctggggtgagtgaatggaggggacagaggccttgtccctggggacagggtgtgagtgctctgtggggagaggggtcagacccccctcccattattttcatccacctccatcgtcctctcccctcccccacccagccagagcatcccagacaactgccctcttggctccaaagtgtgcagcatcttcagccttacggaattctgaagcagaaattctaaaagccaaagaactgcagaatcgtgacatgtcaccgctgtgggagagtccgtctagtcctgtcattctgaaactttcttttgcagtggaacccacaactcccaccccagctcatttccccccaaaataatagtgcattgataacattgagaacagaccctggtaccagccggcctcattcatccttcattcagccccggttctaccacgtacaactagggtaacttgggggtataatgcatagtttataggtgtgtgtgtgtgtgtgtgtgtgtgtgtcttccctagagacagagtcttgctatattgcccaggctggtcttgaactcctgggcacatgcagttctccagccttggccttctgagtggctggctcacaccaccgtattcagtagttccgtaggttttgacaagtttgtaagttatgtaaccaccaccacaattaatatatagaacatttccatcgctgaaaaatgttgcctcatgccccttgtagtcaatacccttccctgtgttacctgatatggtagcatgaataaaggtcatctagagttagtgactctaggccgggcagggtggctcatacctataatcccagcattttgggacgccaaggtgggtggatcacttgaggccaggagtttgagaccagcctagccaacatgacaaaaacccatctctactaaaaatacaaaaatgagccaggtgtggtgatgcacgcctataatcccagctactccggaggctgaggcaggagaattgcttgaacccaggagctggaagttgcagtgatccgagatcacatgactgcactccagcctgggcaacagcaaggctccgtctcaaaaaaataaaaaaaataaaaaaattagtgattctaatccttgaactgtgtaaatgttaccttatttggataaaggatctttgcagatgtaattaagaggcagaggttggagtgatgtggcccaaagcaaagaacaccaggaggctcccagaaccagaaggggcaaggaatggattctgctctagagcctccagaggtagagtggctctgccaacaccttgatttcaaatgcctggcttcagaactgaaagagaatacacttctgttgttttaagcctctcagtgtgtggtacttttttacagtagtctttacaaacaaatatacctagcaaccaccatgccttgttttctatctgtataagttttgcctttgcaaggatgttacatagacagaatcctgcagtatgaagcttttgtgagtttggcttctttcactcagcataacacagttgagatgcatccatgctgttgcatgcatcagaagtctgttccttttggatgctgagtagtatttcactgctggatacaccacagcttatccattcaccagttgaaaggcatttgggtcactcctaattgggagcattataaataatgctgctatgaacatgtgtgtatagatctctgtgtggacatacactgtcatttctccagagtagataccctggagtagaattactgggtcatattgtaagtgtatttataattttatcagaaattattacccgggcatggtggcatgcacctatagtgccagctacttgggaggctgaggcaggagaatcccttgaacccagtaggtggaggttgtagtgagccgagatcatgccactgcactccagcctgggcaacagagtaagactctgtctaaaaaaacccaaaaaaccaaagaacaaaactacaaagaatctgatgtggctcatgcctgtaatcccagcactttgggaggccgaggttggaggattgctggagctcaggagtctgagaccagcctgggcaacatggcaaaacccgatctccactaaaagtacaaaaattagttgggcgtgatggtgagtgcctgtagtcccaggtacttgggaggctggggtaggaggatcacttgagggtgggaggcggaggttgcagtgaggtgagattgtgccaatgcactctagcctgggtgacaaagtgagaccctgcctaaaaaaaaccccaaaaaacagaaagaaactgacaaactgttttccagtgtagctataccattttgcattctctccagcacttagtattgtcaggtttttaaaaatttagatattttaggccaggcgctgtggcttatgcctgtaatcccagcactttgggaggcagaggtgggcggatcacttgaggtcaggagttcgagacgagcttgaccaacagggagaaccagatacttgggaggttgaggcaggagaattgcttgaacctgggaggcagaggttgcagtgagctgagatcacaccattgcactccagccctccagcctgggcatcaagagtgaaactctgtctcaaaaaaaaaaaaaaattagatattttaataggtatgtaacaatcatagggttattgtgagaatgaaatgaacatatctgagaatactgcctagcacatggctcctggcttggaagggtaagctcctcttattgcaatcactatggggttatgtcctgtccaggacaaaaccagaggtgaaaactcaaaaaaaaactcaggtgggccaggaggaggctgtggggaccagtgagctcatgtcccatcttgaaggtcaaggtcccgggaagcagctcctgagatggaaatctgcatgtgggtggttttccaggtagtgctcttaggatcttggaggagccagggaagcaggctcgggcagttgcaatagaggccttgaccagtcccatcaggagctgggccagcccttaggacatgtcacagcctgagacagggaggtcatgcctctgtactctgcaagatcagactttggagtggttgcccacaggagagatgttattaatatcttgggtgaagcagcccttttaagctggtgccttgatccgggtgatggctttgaggtggaaaacaagcctgagtggtttcagctttcaacttttcaagagaagctatgtatctagattttgatgttaactctccaaacttttttaaaatgctggaaattctagacttttcaaacctgctgtgaggggctcacatgccaggcacaagggctggagggggcctgaggctgcctgtcgatgccccttgatataaaaccaggctgggtgcagtgccttatgcctgtaatcccagcacttcgggaggccgaggtgggtggatcacttgaggtcaggagttcgagaccagcatggccaaagtggtaaaaccccgtctctactaaaaaatacaaaataataataataataataataataataataataattagctgggtgtggtggctcacccctgtaatcccagctactcgggaggctgaagcaggagaattgcttgaacccgggaggcggaggttgcagtgagccgagatcgcgccattgcactccagcctgggcaacaagagcaaaactctgtctcaaaaacaaaacaaaacaaaaacaaaaacaaaaaaggaaaaccaaacaaaaaaacccccaaaacctgctgtgtcatctgacatcacgctagtgtctggttgccgcactggagaggacaccccatggggcaggaatctttgggttttgatctccaccacatccccagcatgtagggcagggtccaggcctggatgcagcacgagagaaggaacgcagggcccgaatgagtaatttgcctcagtgtgcaggtcatttaattgcaaagagaggaaaaacgacaaccaaaaacaaccaaatgaaaaaatgagcaaaggatttgaatagacatttctccaaagatgtacaagtggccaataaacagaggaaaagatgctcagcgtcagtaatcattagggagatgcaaatcagaattgcaagcacgagataccgcttcacacctattaggatgcctattaaaaaacaaaaacaaaaaacaaaacaaaacaaaaaaatcaggcagagtgctgtgactcacacctgtaatcccagcactttgagaggctgaggtgggcggatcacctgaggcagggagttcgagactagcctgaccaacatggagaaatcccgtctctactaaaagtacaaaattagccgggcgtggtggcgcctgcctgtaatcccagctactcgggaggctgaggcaggagaatcgcttgaacccaggaggtggaggttgcagtgagccgagaccacgccattgcactccagcctgagcaacaagagcgaaactccgtctcaaaaaaaaaaaaaaaaaaaaaaaaatcgcagatctgactgtgtgaccttgggcaagttgcttgacctctcagtgcctccatttcctcctctgtaacgtgagagtaaaaatactactcatacctacctcgtagggctgtcatgaggactgaataagtgcataggtacagacatgcttaggacagtatcagcacatgcaggaattacatgggagttggctgttaatattattacaggagtggatcaaatccatctctgccatggacttgctgtgtgacctagtgcaggtcactttgcctctcttggtccagttttctcacttgtaaaatgggaccatactgccactctccatagggcaagtgtgcggattcgaggagctcatatgtgaaaggcctccttcaggcgcaaggttggtccttggttatgcacgtatgtgagcctcttggcgtgccttcatatgtggggcataggcaagcactcaagtggcctggactcctatctcggctctcaatgtccccgcttcctggcctgggatcagcaggacctcagtggatccaccatccaggcacatccctttctttccctgcttttttcctgcttcttgggcggcaccaccacctactggcctaaagctacattgcagccaatgtgcacagcggggcggagggaagggaatatggccttgggcagctgctgtgcgcagaatatttacctctgtacacgcttagggtgctgaggcttagggagctcacacggagagagccagctgtgaagctggggttagaatccctgtctccctttcacctcactccaaacaccctcttagaatgggaactcagttcaggttctgccttgggccctagacgatccacccctcccttctgagcagggagccaggagctgaagtccagggtccttggaagtatgtcagggttgtccccccagggtcctgattacagaagaaagaacactggactcagagtccagaggttgggggtctagctttgccttccctatccccaactatcagcaaaacagcctttggaaaatcctcacccatttattctagcacttgtcatttcgaaatatatttactgtgggagagcatttaatgtgagtgttaggttctaacgcaaggagaaaattataaaaataaacaaaaacttttaaagaactcctaaaaatcctttaagtcactcataaagtataatatgggcagttttctaaatatagtcctttgcagcaataaatgcacggaccataaagaacagcagtatatggtggtgattgcatgcatttgcgaactgtaattttaggttctgttctctctcaggggtgtgtgggattccgagctgtggatccacacccccacatctctctcacagctgggatcatgtccaggcagaatcgcccacattgtgtacatcattctcccttctctctctctttctgagcgcacatagctgcatttccgaagttacataataaaaacagctaacatttattgagctttcattatgtattaggcctgctcgcagccctttgctcacgcattaattcattaattcagataatcctcctaagaatgttatgaggtaggtatattattatctcttctctttacagatgaggaaactgaggcactgaatggttaagtaactagcccaaggtcaaatagtgtaccacccagcccgaaggcgttcaccttgttcccgggtaggatcgcagaactggttaagctaggttaccgatccgggtggtgtcagctgatccctcagctgctgtagtgcaagatctgcaaaatatctcaagcactgatcttaggttttgcaatagtgacactgtccccaggaacaacttggggaggttcagacccttgctgtcagaggctgcacagcccctaaaccttgatttctaatcttgtagctaatttgttagtcttacaaaggcagactggtccccgggcaagaagtggatcttttcaggaaagggctattgtcataatttcctcagttacaatttttgcaaaggtggtttcaatagccagtgagtggtacagcctgaatttgaaggcaggaagtccgggacgagaacccacactcttgactggcatacttgccacctgaatggaggctccatagagccacgcgtgcatgcttgtgtacctgttgtcagcccgcaagctccgttaggcaggctagaacctgatccaggttaactttgcatccttagtgctggttctttccatccagggccccactcagggtatatgctcagtgactgttgtacaaatgcataaagctcagtttgcataaagctcacttcagcttctgtatctgtaagacaagaatcagagccaggcacagtggttcatgcctataatcacagaactttgggaggctgaggcgggcggatcacgaggtcaggagttccaggccagcctgtccaatatggtgaaaccccgtctgtagtaaaaatacaaaaattagccaggtgtggtggcacgcatctgtaatcccagatactcgggaggctgaggcagaagaatcacttgaacctgggaggcagagtttgcagtgagccgagatcatgccactgcactccagcctgggcgacagagcgagactccatctcaaaaaaaaaaaaaaaaaaagaatcgaaatcagctcttcagattgctggaggctccgacaagcccattggtgggaaaattctctttaaagacactgatgtgggctgggcacaatgactcatcctgtaatcccaacactttgggaggccaaggtggatggatcactagaggtcaggagtttgagaccagcctagccaacatggtgcaaccttgtctctactaaaaatacaaaaaattagccaggtgtggtgacatgaacccataatcccagctactcgggaggctgagatgggagaatcgcttgaacccaggaggcggaggttgcagtgagccaagattgcacatctgcactccagcctgggcgacagagcaagactccatctgaaaacaaacaaacaaacaaaacactgatatagtttggatttgtttcccctcccaaatctcaggtggggttgtaatccccagtgttggaaaaggggcctggtgggaggtgattggatcttgggggcaaacatcccccttgctgttcttgtgatagtgaatggattcttacgagatctgcttgtttaaaagtgtgtggcacctcctcctaccccgctccagccatgtagaacgtgcctgcctccccttcgccttctgccatgattgtaagtttcctgaggcctccccagtcatgcttcctgtacagcctgcagaaccgtgagccaattaaacttctttttttaaatgaattacccagtctcagttcattataccaatgtgagaacaaacgaatacagacactaaattctcctttgcccacctcctgcttggtcccttcttgaattttcaagctgctcaaccaagtggcctgcaccagcttgggagagctaatcgtgtgtatctgtacccaactctacattcagtaacatcatgtttgtagctcgaaatcagcaatggtgagtatttacactatggcaattggcaaatgcttcaaacaggagttttcccctctagagatgttaaacgtttgccaggaggaaatcaatcctctaatggccaccttcaaggaggcaacacagtggagtgatcatgcttgttggctctggagccagaacacctgggttcaaagtccagctctatcacttaccagctgtgtgaccttgttcagttacttaacctctctgagcctcattagtctcattcatgattacgtatttcattggggactcaatgccatcttccatataagtgctctctcaattaatgttatatattaatattatcaatcagcttaagaggtggggaaactttcttgttttccatcctaggaaagggagtgctgaggacaggacttgcagtgtcaaaaaggaacctcaaaaacggcaatgtgtaactgcaggtctgggccatttttgagggtctcttgagcattggcagaccagatctttatgccaacacaggttgtgcgtgtgggggttagaggaggagaggccttctcagttctttgcaggaaaggctactgttagctctagagcccagaacagatttagggggagagatgatctaaccaaactttccctctgccctcggcttgccagtcttctcgctagtgaacactcccagtgtgaggtagagggttccctgttccacctccttcctccctctgtagaggaggtatgcattggggcaggtgtgtgtaaggccctcctggggtacccctccagggaatcttcccatcttctccagtactgccccatctgacatcctgcctgaagccacaggtttcccttgcaatcactaaagaagcaggagggaaccagcagaactccctgcccatgtgcacaggaggtgatccagaaacttcaaggggaaaaatcctgctctccaccccagcaggcattgatttttggctgcgaagattacagtctctctctctctctctctctctctctctctctctctctctctcacacacacacacacacacacacacacacactcctgtgtgccaggaggttcctagaaggtcctcactcctcgcactcaggtgctccagggctagcccactcctgggaggtgcccacaactgaccacgatgcccacaagactgtgggaagggttgccccatgtgccttcgtgcccctcccactggatcccaacgaaggctcttttcacaacaggaatcagagcatgtcactcccaacctgcctaaaccctccaatggctcccaccacttttgatcaagacctaaatcctttctgagtccaccccatccttacagggtctaaccttgcttccatccctgtcttcaccccttattcctccctctgggctcctcttcaggcccttgaggtgccaagctcactcctgccctgggcctttgctgctgctgtccccttggcctggagcactcttccctgtcctttttgcccatgtgaggctgagaggcagacggaatcatggttgctagtgtagagaggccacactactggagtttgtatttcagttctgtcaccttgaactgggtgacctcacccatctctgcctccctttcctccctctatacagtgggaaagataatagcacctacatcttagggtgttgtgagactgattgagataatctgtatggtttttggcagtttctgaaatgcactgtaaactgtctggttctcctcccatcggaaggtgagaatctgactgctccccttgactctgggtgagagggtagggcaacagcaatgctccatgatttcagaggctgggtcataaaaacggtctgcaggggattcacttccagaacagtggagtgaggaacactgcagactgctttctggtgaaaacaactgatgatgatttctaaaaaacaatcatttgaagtctctggaaattgtcctaagagcatacagcaagtgaagaaacacttattcaagaaaatctactaaatctaggtaagaacagtgagtttgtagaacttgagacacaatccactctctttctcccctccattccattttactgttatggaaactcaactgtgagcagccagggccaagaagatgggagtcatttccccccaagctcctagtcgatggggtacagcatctccccaggaagggaaggctgccagcatttgtcatcctcccaacagctatatcttacagaggctaaactccaggtaggtgtggctgggagactgggatcttccttcctctacccagtccccactcatagggtggtggccacgccaagtgcagcaggctaaaaatattgaagccccagttgcttttgtcttagcttacttgttaaagcagaggttccatgcctggagatgcaagctgagaagaccagagactaagaatactgccccaactcagccctgctcataaagcaagaaggttactctgggagaagtgaactgttgtccctgcctccagctccagagcagtgtcacagatgctttgcccaagagagaggcaggtcataacaacacagatctttaaagttgtccataaaggaactgactttctttagaacagagtatgcagaaatttaagcctaagagtgccctcagaagcagtggcgattttggtagtgatcagggacccaaagttgctatactatatcatcttaaatgttcattttccagcaaagaatttcaagacttgcaaagaaataaacacatgtgacccatacacagggaaagaccagtcaacagaaactacctgtgagagtgctcagaggtcagacttgcacggacttcaaagcaaccactgtaaatatgttcaaagaaataatggaagccatgcttaaagaataagggaaggtaggctgggtgcagtggctcatgcctgtaatccccgcactttgggaggccaagaggggtggatcacctgaggtcaggaatttgagaccagcctggccaacatggtgaaaccccatctctactaaaaatacaaaaattagctgggcatggtggcaggtgcctgtagtcccagctactcgggaggctgaggcatgagaatcacttgaacccaggaggcggaggttgcagtgagctgagattgtgccactgcccttcagcctgggtgacagagagagactccatctcaaaaagaaaaacaaaaacgaaaatcaagaataagggaagcggtgatgactgtgtctcatgaacagagaatgtaaacaagaagatactattttaaaaaacttaatggaaattctggagttgaaaagtgcaaaagaaaaattcactagaggggctcaacagtagacttgagccagcagaaggaagattcagtgaatctgaagacagatcaatagagatttcgcagtctgaagaacagagagaaaaatatgaagaaaaatgaacaaagccttggagaaatgtgggacacagctaggtgcaccaacatatgcacaataacatatataacagaaggagagcaaagagagaaaggaacagaaaaaaatgtgcaaaaataatcactgaagcctttgcaaatttgatgagaaacatgaattatgcattgaagaagcttaatgaactccgagtagaacaaatgcaaagtggtcaacaaccagatacataaaaggaaaatgttgaaacccaaagataaaaagaaaatcttgaaagcaacaagagaaacacagctcatcacatataagggaacaccaaataagaccgacagcagatttctcatgtgaaacgatggaggccctaaggcagtgggacaacatattcaaaatgcataaacaaaaactaccaagcaagaatcttacatccagcaaaattatctttcaaaagtgatgatgaaagagatatttccagataaacataaactgagaatttgttgccaggaaacttaccttacaataaatactaaaggaagttcttcagacagtaatttgaatccacacacacaaaagccaaagtgctctgggaaaggcaagtagatcgttatgaaaggcagtaagaatgcatatttattcaccttctcttaacagatttttaaaaataatttgtatataattgtattgtggggccaagacatatagaaatgtaatatattttgataataatagcacacaggaggtgagtgggagcagagctgtattggattaagaaagtgagaccagatgggaactggaatccacaggaacaaatgaagagaaccagaaattataagtaagaaagttaataaaacaaagtcttttaatatatacttgctctcctttcttctctcagcttcttcaaaagacataaaactatataaagtaataattataacaaagtactgttggttttgtaacatatgtagatgtaatacatataaaaagaatagtgcaaagaggaagaagagagaatagtgctatataggagtcaccgggcacggtggctcacaactttaatcccagcactttgggaggccgaggcaggccagtcacttggggccaggagttcaagaccagcctggccatgtatctctacatataatagattgaaaccatgtatctctacgtataatacaaaaattagccaggtgtggtgtcatgtgctggtaatcctagctactggggaggctgaggagaattgcttaaacccaggaggtggaggttgcagtgaaccaagatcacgccaccacactccagcctgggcaatagcacaaaaatctgccaaaaaaaaaaagatagaaatatataggagtaatatttctatatatcactggaattaagttactgtaaatctgaagtcaattctgataagttaaaacctatatagtaagcctaaactggtcattaagacaaacaaacagaacagtgaaaaagctattaaagaaatttaaggctgggcacggtggctcacacctgtaatctcaacactttgggaggctgaggtaggtggatcacctgaggtcaggagttcgagaccagcctggccaacatggtgaaaccccctccctactgaaaatacaaaaaattaggtgggtgtggtggcaggcacctataatcccagctacttgggaggctgaggcaggagaattgtttgaacctgggaggtggaggttgtagtgagccgagatcatgccattgcactccagcctgggtgacagaatgagattctgtctcaaaaacaaaaacaaaaacaaaacaaacaaaaaatccaaaaaacagaaatttaaataatacactagaaaatattcgtttagtgtaaaagatgtcaaggaagaaaagaggaacaaaaaagacatgagacatatagaaaataaaaagtcaaatgacagacataaatccaacttctctcaatgatagcattaaatgtgattggatcaagtcaaaagggagagatttcctgactaaataaaaagccaagatcaactatatactgtgtgcagaagatacactcaagattcaaaggttaaaagtaggttgggcgttaaaggctgaacaaaatatatcacgcaaacagcaaccataagaaaacttgatttgctatattaatatcaggaaaaagactttaaaatgaaatatgttacaaaagataaagaggaacattttataatggtaaaaggatcaatcgatccattgggaagacataaaaattatagacagatatgcccctaacaacaaagccccaacatgtgtgaagcaaaaacagaaagaattgaaggggcaaatagacaattcaaaaataatatttggagacttcaaaaccccacttttaataatgaatagaacaactaaacagaagactaaagaaggcaatagaggctgggcgtggtggctcatgcctgtaatcccagcactttgggaggcccaggcgggcagatcacctgaggtcaggagttcgagaccagcctgaccaacatggagaaaccccgtctctactgaaaatacaaaattagccaggtgtggtggcgcatgcctgtaatcccagctactcaggaggctgaggcaggagaatcacttgaacctgggaggcagaggtttccgtgagcccagatcacaccactgcagtccagcctgggcaacaagtgcaaaactccgtctcaaaaaaaaaaaaaaaaaaaagaaaaaaaaaagaaggcaatagaagacttgaacaacactaaaccaacaagacctaaaagacatctatagaacatttcacacaacaacaagataatacacattcttctcaagagtacgtgaaaaattatttaggacagactatatgttagaccacaaaacaaacatcaatgatttttttatcttttatttttttttttaatatggagtcttgctctgttgcccaggctgaagtgcagtggcatgatctcagctcactgcaacttcagcctcccgggttcaagcaattctcgtgcctcagcttccagagtagctgggattacaggcacccaccactatacccagctaatttttatatttttgtagagacagggtttcaccatgttcgctaggctggtcttgaactcctgacctcaagttatctgcctaagtcggcctcccagagtgctgggattacaggtgtgagcaaccgtacctggacaataaattttaaaagattgaaatcatacaaagtaccttctctgactaaaatggaatgaagctagaaatcaatagaagaaaaccaagataattcacgaatatgtgaaaattaaaaacacactcaaacaactaatgtgtcaaaatagaaatcacaagggaaattggaaaacaccatgagggaatgagaataaaaatataacataccaaaacttacgtgattcagtgaaagcagaaaaatttatagctgtaaagacctgcactaaaaagggagaaaggggccaggcgtggtagctcactcctgtaatcccagcattttgcgaggctgaggcaggcggatcacttgaggtcaggagtttgagaccagcctggccaacatggtgaaaccccatctctactaaaatataaaaattagctgggtatggtggcacatgcctgtaatcccagctacttaggaggctgaggcgggagaatcgcttgaacgcaggaggcagaggttgcagtgagccgagagcgtgccactgcactctaacctgggtgacagagtaacactccgtctcaaaaaaataaaaaataaataaaaaaatttttttaaaaaggagaaaagtctcaaaacaaccacctaactctacaccttaaagaactacagaaagaatacaaaaattagccgggcatggtgatgggcacctgtaatcccagctactctggaggctgaggcagagaatggcatgaacctgggaggcagagcttgcagtgagctgagatcgtgccactgcattccagcctgggcaacagagcgagactccgtctcaaaaaaataaataaataaataaaaaataaaaagaactagagaaagaagcacagactaaacccaaagctagcagaagaaagaaaataattaagattggagtggaagtaaacaaaatagagtatagaaaaacagtggtaaaaaaatcactgaagctgggcatggtgccacatgcctataatcccagcactttggaaggcagaggcaggtggatcacttgaggccagcagttcaagaccagcttggctaacatggtgaaaccccatctctactaaaaacacaaaaattagctgagcctggtggtggacacctgtaatcccagctatgcgggaggctgaggcaggagaatcacttgaacctgggaggcagaagttgcagtgaactgagatcatgccactgcactgcagcctgggcaacagagcaagaccctgtctcaaaaaaataaaaaataaaaaaataataaatcaaagaaacaaaaaattgatcaatcaaattgacaaacctttagctaaactggctaagaaaagaagattcaaattactaaaatcagaaatggaagttcggacagtactactgaacttacagaaataaaaataattataagaaaatactatgaacaattgtgtaccagcaaattggagaacctagatgaaacggacaaattctggccaggcgtggtggctcacgcctgtattcccagcactttgggaggcaaaggcaggcagatcacaaggtcaggagattgagaccatcctggctaacatggtgaaaccccgtctgtactaaaaatacaaaaaattagcctggcatggatggcacgtgcctgtagtcccagctactcaggaggctgagacaggagaattgcttgaacctgagagatggaggttgcagtgagccgagattgtgccactggactccagcctgggtgacagagcaagattctgtcaaaaaaaaaaaaaaagaaagaaaggaaagaaagaaagggacaagggacagattcctagatacacatgatataccaaaactgagtcatgaagaatggaaatctttatagacctgtaatgaagcagtgatcaaaagccatccaaaaaagaaaaacctttgacaagtccctggtgaattctaccagacatttaaagaagaactaacatcaatctttctcaaactcttccaaaaaatttaagaggagggtcggggggctgggagatccaacatgacctcatccacatgactggcaattggtgctgattgtcagcaggaatgtctgtgttctcctccttgcggtcactcttgctctgttaggtcagacatcatcccttacatagaggcccaagggtccaacggtccaagtccaagactgaagctgcaaggtctcttgaggcagaggctctgaaaaccacatgatgtcacttctgtcacacgctattggtcaaagcaagtcacatgcctcactcagcttcaagtcagtggagaaacagactccaccttggatgggaagaatagcagagtcacattgcaaaggggtgtggataagggttgggaggaatgtgtagccattaatttacaccagataatgtgagtgtttgcactttacaaggtccacaggtccactgatacagtttggctctgtgtccctacccacatctcaccttgaattgtaataatacccacgtgtcatgggagggaccccatgggaggtaattgaattatggggcgggtttttcttgtgctgttctcgtgataatgaagacatctcaagagatctgatgtttttatcggggggagttcccttgcctgccaccatggaagatgtcccttgactcttccttcatcttcagccatgattgtgaggcctctccagccatgtggaacagtgagtccactaaacttgtttcctttataaattacccagtctcaggtatgtctttattttattttattttattttattttattttattttattttattttatttttgagacagagtcttgctctgtcacccaggctgaagtgcaagggcaccatctcggctcactgcaacctccgcctcccacgttcaagagattcccctgcctcagcctcctgagtagctgggactacagtgcacgcctccacacccggctaatttttgtattttagtagagacagggtttcactatgttggccaggctagtgtcgaacttctgatctcatgatccacctgcctcggcctcccaaagtgctgggattacaggcatgagccaccatgcccggcctcaggtatgtctttattagagcgagagaatagactaatacatccaccaaccctaggaagtcagtggaagggtatttccgtatttcatatggaagtcatttccatatgaaaatttagccagaggatttcatgctggttgtctgaaagccaggagcttctaaaaaactttcagggtagctgtctaagcatgacctcatgtcatcctgttgtgagtactaaattagttaattcaggggaggcactcagaaaagtgaagaaagggaaatctttcttatataaatcttagaaatctcatagaaatcttaggaaagtgcctggcgtgcagtaaacacgtgatacatttcagttgttattatcttcacaataatttttttgggtcaggcttgttattttccctgttttacagattaaggggcagagactcagagatgcgcagtaagtcgcctgagggttacgcagcaaataagcagggaagccagatgagaacctacatgacagagtcacccatgtgtgagactccaaagcctcattcaggtgcacagagaggcggttgtgaggacgttcactgctgcgttgccttcagtagcttaacatcagaaacagcgcagatgtccaccaacaggggccacccagtaaaccccagcatgcccagccaaggagtgctttgtgctggttacaagaaatgaggtcacgctatacataggacatgggatcatctccaagacattctgttcagtaaaaagaacatctgaaaaaaaagttccataacccacagaaaatactgccaaatattccaaaaaatctaagtccaagtgtgtgtgtatgtgacctctggaggctgatctgaagcaaatgtaggtgaattaaacaataggatctatttataggactcttcttttcctacttttctttatttttgttggattttgaaacatgttcaaagaaaaattcagagtacaataaagtaccagtcgggcatggtggctcacgcctgtaatcccagcactttgggaggctgaggtgggtggaccacctgaggtcaggagttcgagatcagcctggccaatatggtgaaaccctgtctctgctaaaaatacaaaaattaggtgggtgtggtggcaggcacctgtaatcccagctactcgggaggctgaggcaggagaattgcttgaacccaggaggcaaaggttgcagtgagctgattgtgccactgcactccagcctgggcgacaagagtgagactgtgtctcaataaataaatgaaagaaagaaagaagaaagaaagaaagaaagaagaaagaaagaaaagaaagaaagaaagaaagaaagaaagaaagaaagaaagaaagaaagaaaaagaaaaagaaccaagaagaaaaaataatcaccggagattcctcccctcccctagagctaactaggctaacattttggtatatatctttccagtccggatcctgtgtgactgagtgtgtatatgcatatgtattattttcaactgttggctttctccttgtggtccaagacagctgctccagatttagccattacatctgtttcctgccagcaagaaagggaaaatgggaagtagagggccttttaagtatacaacctagaatttacacacattattctttatcacatctcatttctctaaatgtagtcgcatggccatcctggccagaaggaagcctgggaaatgtggtctttcctctgggctgccttgtgcccagtgaaaagtcaggggttctatgactatgaaagaaacaggagaatggatattgtggcaactagcagtgctattcacctttattctctcaatggtaatatttttccccatcaagaggggaaaatttgtgtcttacattctaaccactgaactccgagagaagacactggcctgtgccattctcttgcgatggagtttcgctctgtcgcccaggctggagtgcagtggggtgatctcagctcactgcaacctccacctcctggattcaagcaattctcaggcctcagcctcccgagtagctggaattacaggcacctgccagcacacccctttttagaccacatagggtagcttccgactgttgccatggcatttgtgaattgtcatgtgctggtgggagtgtctcttagcatgctaatatattataattagcatatatattataatgagcagtgaggaggaccagaggttgctttcatcaccatcttggttttggcgggatctggccagcttctttactgcatcctgtttgttttatcaataaggtctttgtgacatgtaccttgtgaaaccagtcctgcctaagggagcggggctggcggttgttcagagtgaacaattcaaagtcaggtcctccctcttggagctcagagacttgaagagcaaggaccactgtcaggacacaaccccatttgcaaggccggggacacacatacagacccacaggccattgtagagaaagtgttaaaagatggaagtcaagccacggccactggaagtggtgtgccctgagaggcagagggttctccctaagccagggaaggacaaggcagggcaagacagaaactgggcctggggccaggattcctgagctggggctagatttgcccaaatctagggcagggctgactgggtcaagcacagcagggagccagggtgggtcgatccccctgccacaggcttcactcttctggctctggtttccaggcagttctaaaagcctcccagtggcccagtgcagtggctaacgcctgtattcccaacgctttgagaggccttaggcgagcagatcacttaaggccaggagttcgagaccagcctgaccaacatgtcaaaaccccgtctctactaaaaatacaaaaattagccaagcgtggtggcagtgcctgtaatcccagctacttgggaggctgaggcaggagaacccaggaggtggaggttgcagtgagctgagattgtgccactgcactccagcctgggtgatagagcaagactgcatctcaaataaaataaaataaaaaaatcaaatcaaataaaatgtctcccagaatacaccaccccagcaaaatggcaggagggagtgtcacctggggacctccactttggaggtttgagtgggcagctttaagctggaacagtcactcttgctgtgggttctcagggcggagactgagcccccaccctgcctcctcaaatgcatttcctctcagctcccacctgccagcccaggagagagggagggccattctgtccttttcctgcagagtccctttgttcagttggtgaccaacatcctgaaaaacattctcaggagatcaaaaagaagaacattttggtctatgtggtaggttggcccagtgcaccacgcccagtgcaggtccctcttgaaaccacctttgggaaattatgactgagacaccacctttgcaaaattatgactgagacaatgagagatctttttttttttcctttgagacagagtttcgctcttgttgcccaggctggagtgcaatggtgtgttctcggctcactgcaacctccacctcctgggtttaagcgattctcctgcctcagcctcccgagtagctgggattacaggcacgcgccaccatgcctggctaatttttgtatttttagtagagacaggtttctccgtgttggtcaggctggcctcgaactcccaacctcacacctgaggttgcctcagcctcccaaagtgctgggattacaggcgtgagccaccacgcctggcccacagtaagaggtcgaacttaacctactctatcttgcttctaacctccaagctgtccttgttcattcctgggcataagctgaactaaccttgggagaaacttagtttatactttaaacagccctttcccaaagcagacctccttcttgcctggggactaagctgcctttgtaggactaacattagccacaaaattagaaattttggtttaggagtcatgcagctggaggctacaagatcctgaccctccctaaactactcctgacatcagggcttgagatatttttcagaccctgcacttgatggatcagctggcatcacccacgtcaataaactggctcatctgatcttgtggcccccacccaggaattgattcagctcaggaagacagcttggactccctgtgatttcaaccctgaccaatcagcactcctggtgcactggcttctccccacccaccaagttatccttaaaaactcttctccccaaatgctcggagagacagatttgagtcataaaactccagtctcccacgcagctggctctgtgtgaattactctttctctattgcatttctcctgtcttgatgaatcggctcttgatgaataggcagcctgcaaggtgaaccccttgggcggttccactctttgcccagggtgatgttatttctctccaggatggctgcagcggcttctgagcctgcttgcatctggtgtggtccctttcaatgtcacgcaggccaaagcagccctccatctctccatgatcttggcttccaaggtactctgtctctctctctgggtcgccatactggcttccatcaggccctggaatgcatcctgctggttctatcccttggccttcaaaagtgcggtttcctcctggaaggcaccttctgccttacctcacacttccttccctcctacctgccttgagataccagcttgcaggggcattcttgggaaagccgaccccttggactgagtctggagttttgatctctctctctcttttttttttttttggagatggagtttcactcttgatacccaagctggaattcaatggcgtggtctcggcttaccacaacctctgcctcccaggttcaagtgattctcctgcctcagcctcccaagtagctgggattacaggcatgtaccaccatgcctggctaattttgtatttttagtaaagatggagtttctccatgttgatcaggctggtctcgaactcccaacctcaggtgatctacctgccttggcctcccaaagtgctgggattacaggcatgagccaccgtgcctggccttttttttttttttttttttgagatggcatctcactttgtcacccaggctggagtgcagtggcaccatcatggctcactgcagcattgaactcctgggctccagcaatcctcccacctcagcctcttgagtagctgggatcacaggcatgtgccaccatgcctagctaatttttgtatttttttttgtagagacagggtctcattatgttgcccaggctggtctcaaactcctgggctcaagcaatcctcctgcctcaacctcccaaaatactgggattacacgtgtaaaccaccacatccagccctgatctcattcttcagagaatttacctagctggtcacttggtgtctgtaggagcatcgcctctcaggcctgcctcaaaactgcatttcagttgggagtggggcggggggagggagagtgtagtttggggacatcaagcgtctgtggtggatctcctcccaaagtgagactgctttttaatgatatttattgagcacttactgtttgccactgcggtgctaagcactttgcacatactagctcagtgcatccttacagcaatcctgggagggaggtgcttttctcatccgcatgtgctgacaaggctgagaagagctgggtcttgcacggtaccttaagggctaaagacctgcaaggatggtgcatgaaagcaaaaccagagaggcgccttttccaaatgccaatgcgccctccacccagtccttcacaaaccacatcagcatggatagcaccacactccacaggcttttctgcatctcctttgtgtgtgtgcacatgtgtaattaattctggggcaacttcctacatcagtacagagaaactccttgatcattatccactccaacatccttcctgggagggactgactggaaacccaaatgcccttgtaagggcaaatacaaaaactaaaataattctccctggtgcagaaaaaggaaagaaacctcccgtttcctgttcttaaacactctagagcaaacactttagaaaacttctcaattatttctctgttcctttaagatgtgtctttttaaaagccaggtgagcctcctgccagttttacaagccagggatgttttcccaaggacctaggagccatctctttggaaggtaaacatcaagattgcacccttctcatccagtctccatgggcagataggagcctaacttcagtgcttggctccaagttgcaaaacaatccatcgtctatcataaagatgtgagtttatattttctctggataaagacaattagctaacacagatggccactccaattaccaggtgaattcgggatgaaataagttgcaaattgtgttgtgcagtcatctgactcgagaactatttttttttttttgagacagagtctcgctctgttgtccagtctggagtacagtggtacgatctcagctcgctgcaacctctgcctctcaggttcaaacaattctcctgcctcagcttcccgagctgggattacaggcgtgcactaccacacctggctaatttttgtatttttagtagagatggggttttgccatgttggccaagctggtctcgaacttctgactttaagtgatctgcccaccttggcctcccaaagagttgggattacaagcatgagccaccaccccggccctagttattatttgaggacatgtatgcaataggttatacctgcttggttatataggaggacgaaatgtatttctctttgtaatctcttttgtggattgcctgtgatgcccactgcagtctggtttaacgcttatttaataataaaactgttttctcttctacttttgtggaaaggttttctggattagatctttaattttgtctccagcatcttcaaatgtctttctacagagggttggttaaataaatgtggcatctccacaaaagagaatactgcacagtcatggcaaaaaaacaaggagcctgttttcgttgttgaatgaaaagtgcaaggtgcacaacagtttactactttttctgtaaaaaaagaggtctgagaaggctgtatttgccatttgtataatctctggaagggtaaacagcgactgataaaagtgctcgtgtgtgtgtgtgtgtgtgtgtgtgtgtgtgtgttaagagaaactgggcagatgagggagaggaaagggatgaaaacctttctctgtacaccttatattttctgattttttgaaacacgtgactgtattacctattcacagtaagttaacagggatgggaagcatggtggtggcaagcaaacgaaacctctaaaaagaagtcccaggggccgggcgcagtggctaactcttatgatcttagcgctttgagaggccaaggtgggcagattgcctgaactcaggagttcgagaccagcctgggcaacatggtgagacctcgtctctactgaaaatacaaaaaatatgccaggtgtggtagtgcgcacctgtagtcccagctactccggagactgagaggcaggagagtcacttaaacctgggaggcagaggttgcagtgagccgggatcacaccactgcactccagcctgagcaacaggcaggactctgcttccaaaaaaaaaaaattagccaggtgtggtggtgggcacctgtaatcctagctactcaggaggctgaggcaggagaatcacttgaacctgggaggcagaggttgcagtgacctgagattgcgccacggcactccagcctgggtgacagagcaagactccatctcaaaacaaaaaaagccccagaaccagacatccttaagcacttgattctgttcatttctgagctcagccttgagcttagaaccaagtgaaaactaattacacattttcggagttcacattaaacttcttctttttaaaattattatttttgagacagaatcttgctctgtcacccaggctggagggcagtggcacgatctcagctcactgcagcctccacctctggggttcaagcaattctcagtctcctgagtagctgggactacaagcatgtgccaccatgaccagcaattttttgtatttttagtagagatgggtttttgccatgttggccaggctgatctcaaactcctggcctcaagtgatctgcccgccttggcctcccaaagtgctgggattacaggtgtgagccactgtgccatgcctgaacttctcctttgaaggaagatctgagtgtaaaagcagggaatgcctttatttaaaaaaatgaaaaacagaaactaaaacaaaataacaatcacctctgttgcctccatttgagagaatacttccaggggctctgcatgtctggtccccaacctggtcggggagttcactttcagaggctcagggatgggccttccccagccccaccagcaaatcatctctcccggcttccaggagggtacttactctccaactagtgggctttatgggccaggaaggatgacaggaaggggtgtgtggggtactacgtccctccacactgagaatccgaaagccaagatgcccaagattctatcgttatctgcttgtcttgtagaagcccctctgtgagactgaggggcaaaggagagagggcaggggcgtgtctcaacccttctggccacttctaggttgtgcagactgccactcttgttactacgatggactgtcagatcagcaggtggcccaggagggcttgcttgatgcgggctgctttttccttttgcctccgtgccatgcctgtgaggtagttggtacttactggaatccccactgcatgcatgaagaaacaggcacagagaagccaaatgactttcccaaggtcacacagcctgaagggacagccggctgtcccagctgtttcccttctaacacccttgggcctgcctccagctagatgctgcaaatcagtcctctcttgagagtcaaagcaaaggagatctgagctggtcgtcacaggtagtgtgacacagagttggggatagagccgcaccttgcatttccaggtgccatcttccccacagtccccagtgggcacttgcgttcatgattcaattactcaggctctgtctctctgttcctgccccttgctctgtgacctggcctctctggaccccagttccgtccgtgagcgatgggggcggggtcggcggcctgcctaggctggacagtgcagattgcagaagtccgcggacgagaagagccgcagcacgttgaccagagggaacatgagcagcgctccgagcagcgagcccagctgcaccgccgccccgcaccacaagagggcgctgcggctgaggtcgcgcaggaccacgcccagcatcaccttgacgtaactgaggcagccgctgaaaagcacccacgaggccacctgcggggccgggagggaagaggtgcagagtcacggggcttgcggggcgagcgccggagcaaagaactctcacagggctcaggggaacccacggaatactctctaggtgcgaggagcgccttctgggagtgagcctgcggggccgacgggtcccatgagttggccgcccgggggcgaaggagaatccagtggcttttctgggttcacgtgcccatgatcagggcaagggcccttgagagaaggcccctgctgaggtacacatggtgggaagaggcctaccagtcacctcgattccctaagcctccactcccaaatgaggaaggggcgcttcccccacctggggcttcccgggagggtcccacagaccccgctcgctggaaagggccgcgcccaagctctcccaggccttggctaggggtgaggggtacgcagcgggagcagccccaccggccggatactcacaatgaggacttccccaccccagtggccctgcaagagggggcaggggctcatcaccgccatggccatgttgtagcccccaaagcaggtcccaagcacggagaggacccccaggaacagcagagacctagaggaaagtaggggaggtgagtggaggtgagaagcctgacctctgacccccccgccccactgggcggcatgtggatggccagtgtctccatagttagtttagacccatgtggaaaattccaggttgcctggctcaagtgggtcagggaggctcctgagcaggcagggctggcctgagtcatccccagcattaacggcagggcctggcaccccggcaagaaaaacataatggactctggcaccggatggtcctggttcaaatcccagttctactgtttaagctgagactcgcctctgagcctccaaatcggagttttgcaaggctgcatgacctccaggagcagagcatgcaggcctggcgccgctgtgggcccacctggtgtttacctgctggcatttcctcctgcaacacaccctcagcctcagccaggaagctgagttgaagtgaagatggctggatcgggcattggcacagtagggtttgctgtgcctcctcaggagacccctccccttctggcctcagctacctgcctctgcaatgtggagtgtgctgatctccaggggtcctggcagctggcttgttgctgctaggagcatctctctacaggtggccttccatgcaaacctacatctgggaccactgtccttcctcacaggtccttgtccctggggtcccaatctctagaaccccaagactggtccacgccctgggtaagaacagacagaggtctgcctatacccttaaagactctttctgctccaagattcttggattccatgactcagattctgtaattctaacatttggggtttcttggatttgcaggtctgagcctttggtcctgcttccctcaaatcctccatcctctttccagtttctaggtcccaaggtagaaaatccagcttcctggcaagctttctgtcaagctcttctgtcctcactgtccttcttctgggctgggagagtgggtgtaagcaggccagtgaggacaggcaggccagcgtggatacgaggctgtaggacccacctcaaatgtcaagatcccaaggtggtagttctcctacaggggtctgaagcccctgcctcagaaccgtctggtttccttactaaaaattgaaatcccaggtcccagtctaggctggttcaatctgcattttatcaacttgcccagccattcttctagaactgtggctctaagggaaccagcaggaggttagaggcaggaaggcagggccgaaatcctgggaattagaccaggtcaagctctttctccaagcctcagggtttccccttataaacgggaacctcagtggctatctgctcctcctcatggactgatgacaatgatggtcaacgcttaggctggacctgccacgtgccaggcaccgctccaagagctttatagaatcagctcatatcatgcttccagcagtcctaggaggtggaatgttacactcccattttccgataaatatccctgaggcacagagaactgaagtgacttgtcttacacacagctgacaggtggcagagctgggatttggaccagggtgctccccaaacatgttcttaaccactacatgtacagcccagtaggtgcgtttggaattctgggttctgaaatgaagtgttcccccactaggattccctaggaccagatgagggcacacctgttaggcaggaacatggagaccaacgaggcaagagggttggccacaatgctgagggtggcagccaggtggtaggcaactggcccataggacaggcaggagtaggtctgcacagagggcagcatgccgttggtgagcgcgttgacgaaggccaccagggtatagatgaaggccaggtgcgccgggcagcagggggctgctttctcctctagatacccctggccctggctgctgtccaccgtgcctgcagggcccaagtcattctcttcccgcggccggatggagtggagggtgacctggtcattgaggaggtcttccacggaagcctcccagcacctgggttgacgctggaggacaaagaacgccacgaggcagcaggccatcatgatggataggaggaggaagaagaccaggggtgagaagtgggcgggaaggtagcggctctccaggtgggacaagggtgcttccattccggggagggcggacaccaaagctctgggaactccctgcaaaggacaagacagatccctggtcaggggaggggatcaggctgcagaacaacaatcatgacagtgataacagaatacagatcacctgttattattaatggataatgaataaataaacataactaacaaggtggcaataatgactgctcatactgactgcccactgagcacgggcactgtgcatggataagcccctatgcctcctaacagggctgcacagtgggcaccatcatcccccattttagagggaactgaggtatcagaatgcttcgtcccttacctgagggtcacagggagaatgtggcaaagccagactccacctggtgctttctgacttggaagctacaccttttatcaccccacagcagtggcaaccacaaacatgttcagaggaggagctagctggagactgagcagtggagccgcccacctaagaggagagcccccacctaaggggagaatcccccacctaaggggagagcccccacctaaggggagaatcccccacctaaggggagagcccccacctaaggaagaacactgctccacccatcgtctaggaaataagggccttcaggacatgccatcccaaaatatgactgtaggaggccagaatatgccaccccaaaattgacctattggcatattttttatttctagctggttattttgaaaaattgcaggctaaggagtagctctgaaaagttgccattttgtaagataaatttacatctaaaggaaatttttattagtaaagctatcttatctgtaccaagaaaaggtatctgtaccacgaaggggtatctgaaccaggaagagaaaggtgatggcctttatcacccgaggaacttttatctgcataacagtgcaatgtttattcaccataagtttcctcccttcactctcccataatttgtctccaccatcctgcagtagcctcaagcccctattcccttttgtagctcaggatgctatagaagctgaaatcatctggcccttttttgagtctcatattttttggggactcccatgcgtatgtatgtaagtaattaaaatgagtttcctgctgttgatctgccttatgtcagtttaactcataggccgaccaaagaacctagaaggatggaggtgagcagtttttccctcccctacatttgtgataaagccaagtgctgagatggctccgggtgatgctgggtacctgtgcgatgtcagtctccctcgtgggtacagggcttggtacgctgtctgatatctcagtgacattgacgcaggtagtgagaccggagccctgggcaagagccaccagggcgggcaagaggccgctgagtccttcacccacaaagaaggtggtgaggtagtaggtgggcagccggctcatgaacggcaggaaggtcactgaagaggtgcagtccaccagggccaggaagaaggtgaggaccaagaaggcgatgctgtggtggccgtccagcacccaggaggtcatattccagaggaaggcaaagatgatgcaggtgacggttcccacgcccagcagggtgaagatgatgggcacttcggaaaggcagctgggccggaagtgatggagcagggtgaccaggaggggcccgatgttggccagctggatgaccaccgtgaggtaggagggcaggtaccagccctcgggcagctccatcaccagcaggggcagctctacccagagcccattgatggtcacccaggagcccattccgaagacgcagaccagcaggtgcatcaggaaggccatggcggtatctgccctgggccagaggctttctcagatcagcctgcagcggggctggcagagaaggacaccaggtgagtaattccagcttcaccacctagcaagatgctgggacctggggcccagagttttctcttattactccccttcctgtgaacaagctggcttttttttttttcctttgagacatagtttcactcttttagtccaggctggagtgcaatgggatgatctcggctcagtgaccctctgcctcctgggctcaagtgattctcctgcctcagtttcccaaatagctgggattacaggtgcatgccaccatgccagctaattttgtatttttagtggaaacagggtttccccacgttggtcaggctggtctcgaactcctggcctcaggtgatccgcctgcctcggcctcccaaagtgctgggattacagtgtgagccaccacgcctggcccaagctgtctttttattagcagaaaacaagagaagcctttcctaaccgtgattcatgaaagaaaagttcaatccgacacacaaaagcaaacaaagcagcttctgcaaaagataccaacagcaaggtcaaaagttaaatgaaaacacggggaaaacatttgccacataaatcacagacaaagggctcatcttccttgtcaggcctctgagcccaagcctgcgcgtgtacatccagatggcctgaagtaactgaagaatcacaaaagaagtgaaaatggccggttcctgccttaactgatgatattaccttgtgaaattccttctcctggctcagaagctcccctactgagcaccttgtgacccccacccctgcccgccagggaacaaccccctttgactgtaattttccactacctacccaaatcctataaaactgccccacccctatctcccttcgctgactctcttttcggactcagcccgcctgcacccaggtgaaataaacagccttgttgctcacacaaagcctgtttgatggtctcttcacatggacgcgcgtgacattcctaatatataaagagtttttaaaaatcaagaacaaagagaccccatatagaagagggccaaggatatgaacaattcagagaaaaaggtacaaataagctttaaacacatgaaaatattatcaccttcattcacaataggaaaactactccaggtgccatttctcaccatgagattgtcccaaagcctgacaaaatgactcatgttcaaggttattatagattgcgatcttgttggtaatagcaagttatgggaaattttctcctgggtggctaccaacagagagggggctaattaaagggacctgctggaataccacatacctgtttaaaggaataagaaataaggaaagcagatcttggtgactgataaggaaaggtctccaggctataataataatcttgaaacaaaatcaaggcaggtaaatggaaccaggaaaaagtgtactgccttttggtcatagaagaggaggaaaaacatgttttctttgcttgtacttgcacaaagcaacccttgaaggacacacagggactgcagggatgttggtgatgcctctgtatatcttttttttttttcttgtgacagagtcttactctgtcaccaggctggagtgaagtggcacaatctcagctcactgcaacctctacctcccgggttcaagtgattctcctgcctcagcctcccaagtagctgggactacaggcgcccaccactacgcccagctaattttttgtatttttattagagatggggtttctccgtgttagccaggatggtctcaatctcctgatcttgtgatccaccctcctcagcctcccaaagtgctgggattacaggcatgagccaccgctcctggccctgcctctgtatatcttttaataagagttttgatttgtgaaccatgtaaacatattacctgatgcaaatatatggttacctgaaataagatttcaatctggctttttttcctcctgaaattatatcactctctacgtggcctttggagaccacttcctctagccctccagagccattctgccatctgtttacccctttgtcagctaccagtggcagcccacctgtgctgttactaacaactttcttctatctatccttagtctgagcagtaatatgggagatgccaggagtgaggctctggagccagctgtttgagtttgaccctggctctgctgcttacaatctgggtgaccctgggcaagtggctttgcctctctctgcctcatctcctcatctgtaagtaggggatagtgatagtatgaactccgtggtttgttgtgagatataaggatgctggtgagtttatgctgtttccaacagtcccagcatagggtaagcacctctaagggttactgatcattatcgtgaaatggcaggtttggtgacatcgttatttttgtctaattcacatgagaattaatacatgactatgaaaatttaaaaaaggaaaagattcccctactaggtatcaagtgaactcaccagtggtatatgcacctttttgtagagacacgctaactgggccaatcttcacgttttgtagatgggagacgaggtccgaaggggcagaggggctctcctgggatctggactggatcctctgcagcaagcggcctgtccgggactcctcagttcacgctgcagtctttaactccatacttcttccttctagtacaaagcaggagtgtccgttgtggccacgcctcacccaggaaactcctgaatcctggcagctcctccccacggttcccacacacggaattccctcacagggctgggacttccttcctcataccttcactgagcgaacccaatgctcagtggcctttctggtcacctccttttcctctctgggaggagccactcctggggtgtaacgcagtcagatcccctagcagtcccgctctgccccctcccttctgggggcctcagactccattccctcccttaggaagctgacttgactaatagcacaggtgaggcccactccaggcgtgccaagaggacccaaggagggaggggaagctcccagacagcagtggcacacctttgcctgtgctgtcctcccagcctggagcaccagccccctctgctgtccacatccaagctttctacaagactccgtcctccaggagacctctggctgcctcaccttctcaggcgtcctcaccagggcccatgaccccttcatttcaggttgttcttgtgtgggtgcatgcaggcacataccttgagactgaagctttttgagggcaggggctgcttgggaatctgacattttgaaggtggaagggcctttctcaatgacttagcttaggatttgtaaattgttaactcactggccactgccagacagcagatatattactttggtttgcccagtgtgtttaacaatttgttactgtaatcagcagtggaggggatggcaagcaaccttcagcatttctggcttctcaggaatattttggaagaagtggccccccactttggcctctttctctgttctagactcgggccatcttggagctctcccctgcggtaacatctggaaccagttgcctgggttcaaatcccagcttcaacccttacaagctgagcaagtgacctaacctcctgtgcttcagagtcttctcttgcaaaacagctataggctgtcagtaccaacatcagaactgttgctaggaacatgcactaaagtgctaaaactgtgcctgccacatagtgagggctcaatgaaccatcattataagattactatttcagcaaacgtatcagttgcattcaaaaacatgtagttattggccaggcgcggtggctcacgtctgtaatcctagcactttgggaggatgaggcgggcggatcccttgaggtcatgagtccgagactggcctggccaacatggcaaaaccccgtctctactaaaaatacaaaaattagcccagcatggtggcgcacacctgtaatcccagctactcaggaggctgaggccggagaacggctccaacctgggaggtggaggttgcagtgagccgagatcatgccactgcactccagcctgggcaacagagcgagactccatcttaaaaaagaaaaaataaaaaaaaggcgcagtttttgttagacaaatggccactcaactaaaggactacatttcccagccttctttgtagctgcacatggccatgtcatcaagcacaggccaatgaattcaaatgcgactttgagtagtctccttagcccgtttcctgtttagaaaaaaaagtgcagctcgttgccagcactcatttaattttatgtaaacgtgctatttgaggctgaagcaaatctgattctgactgctgttttttttttttttcttttgagacagagtcttactgtgtagcccaggctggactacagtggcttgatctcggctcacagcaacctccgcctcccgagttcaagcagttctcgtgcctcagtctccttagtagctgggattacaggcgtgcaccacaatgtccggctaattttttatatttcttagtagagacggggtttctccatgttgccaggctggtctcgaactcctgggttcaagtgatccccacgcctcagcctcccagagtgctgggattgcaggcgtgagccaccaagcccagccctaaatctgactgattttcaatgtgaaaataacatgtaaaaactgtttttgaagttatttctaaccagaactaacatcagactcatctatttcagaaaaactggattcatcaaacgaatctttggtcaacaactgttcaagaacaatgttaacatcacacataggaatgctaggatttgctattttcagcgatcgagaattactttgttttgtaaatggaaataccacgactaaaaccagaatgctacaaatagagtgatgtcttttgtttccaaagtcaatatactagagcaaggcaaaaataataataaaagcgaggtattttgtggcaaagttatcttggggtaaacactgcagtcacaagtgggtattccttctggcaaacagggaaagagttaacaataagggagtgtgcccttctgctcttcctccatttggctgtctggaatcagatgtgatggccagaactccagcaacgattttgtgctatgaggcatgtggtgggggttagatgcatactaggctcctttgggattttgtggcagagagcacccataccagccctgttttgcctgtgttgaactgttttgtttgtttgtttaatgttgttgttaaattgtaaaagaaacttctatgttgtttaagtcactcttattttatgtacaacaaaagtactcagaggctgggtgcagtggctcactcgtataattccagcactttgggaggctgatgttggcagatcacttgaggtcaggagttcaagaccagcctccaactggtcaacatggtaaaaccctgtctttaccaaaaacacaaaaaattagccaggtatggtggtgggcacctgtaattctagctactcgggaggctgaagcaggagaattgcttgaactcgggatgtggaggttgtagtgagccaagagcacgccagtgcactctagcctcggcgacaaagcaagactcttgtctcaaaaaactaaaagaaacaaacagacaaaaactactccatactaagtgcacagagatacacattccaggatatatattgaaagattatagtaaccaaaaactaatgaatacatttatctcctttaccacctactttctgactctgaaacttaggtcctgtcccaaccaggatttgatcaaaaatcaaaatttaacaaaagtagttgtttagacccttgggggcaaatgtcttgcagagatatgaaaaaaaaaaaaaaaaggagaagagagaaagagggaggaacagaggaacacagaaccctccatatagcatttggtaccaaaagtataaattgagaccaagagtcatttcatatatcaaaactctaattcataaaggagtcaaaattgtagtgactatctgtattctgaatatttcctgaaatagcctcagacattccaggagaaatggacagaagcacagtccagcagtacaggcctgactcacccttccaggtcaagacagcagacgaaggtgcaaaataaacaaggatatagcaaaagcaataaatgatatacctagtaaagagggctaagtcagtagttaaggggagtaggcgaatttgcagatgatggtgacctttgccatatgaaaagctattaaactaatgagagtgtccagttaaacatttacaaacatcagtagctttcccacagagggctggatggggagatgagggcagacagggcagaagtagcctcactttcttgtatgttcgacaactcctaagctctgaacgcctaaatccctgctccccacaaagacgaattctctggttttgacccaggtgctaccacggctgtgtcacttgagggatgggatttggctccgggggtctgtttccttgtctggaaaccaggcacagtgggggtgtgtccccacgtgacccatctgccctatggccctggcccactcccaaattatctccttcctcaaaagtgaggtgtgcttttggacctcggggacacagtgaggaacagtcattaatgtcaatgaaggggatgtcttaggcagagggaactacatgtgcaaaaaggccccagagaaaaggagagactcagaatggctggtgttcggaatgtgttgggatacttttaaaagatgcatatctgtattttctgttttttttttttttgttgttgttgtttgtttgtttattttacagtgaccttgcagttcttatttattcattttaaccagtatttcttgggcaccaactgtgtgctcaaccacaatccctgctctcaggaagttggaggaagcattcacgaagcagaataaaaaacagaaacatagagcaggtcagatggtggcaaggactccggaggaaagcaaagctcctgaatggggaatgtgccgctgtcaaggagaggacatgaagggagtgtgggagtgagctgtctgcagaaagcacggtccaggggagaaaacagcaagtgaaaaggccctggggtgcggccacacctgctctgtcccagaagtggattttgctgttcaaaggacagctaggaggccagtgtggccgcagcagcgggagccaggttggaggggaggagacagggcaggtcccctgtggccctgtggtgacagcttgggtgttttctctagagcaaaaagctccgtgagtgggcagaagagaccagctctaatctagtttttaacaggatcgtgctggctgttgtgaggagaaacatgaggcgccagggaggaagcaggagtaaaccttcggagggttaggaagctgtagcaaaagagctaacaatcaccatgacaacagtgacaaccatagctgccactcctcagctatttattgtgccagaccctgtgctaagctctttgaacacattacctgtcaaatcttgttccacaatcctgaggctggcattatgattatctccattttacagatgaggaaactgaggtttaaaagggaaataaatttgcctagggtcatacagctgggagctgagctttacatccaggcatgcttgactgtggacccagccctgagaaaggcctcagggtgaaggggttctgaaggggccatgggggtcaagctgagcaggatctctttctgctcacagatggcctcccaagacttgggccagagaaagagagaaatggggtacaggctcaggagaagctgagagaggctctgagacatatctgcttcccaaggatccaggaccccttatgtgatcaccagagaccagaaacctaaggcttcgcatgagacagttaagatgccccataatgcgtgggcgacagatagagaagctagaaggatcagttccaggcaaaggtttctcttttgcattcttgcatcaaaagctgtgagcccccagcccaagaaagtgaagagaattgggagtggggttctgaccagggccagtgcaccgtcattgtgtgggctgggccatctcctccagggagctcaggcagcttccatcccacccaatgtcccccgcccccctccacattctcctgccctctgttttcctccatcaaagtattactgacaccagctcagttacgggagtttatctgtgtctatctgttgagcgctggtctctcccattggagtgtaatctccatgtgagcgggggcttgtcctctcccccagtgcccaggtgaccatctggcttgccacgggctgggccacctgagctcctggcaccatggctgggttctcgctctgcagggataatctgccagctggtaggcacctagccctgtgggccagactggaggaaacccgcctcagctatgagggttgtgttggccagggtgacccctggggcagtgccaggtggcagcctgacactggatacatctcactcctgggcaagggtctgagccaattctttcctgggttccaggctcctggagaacttagtgaggcctgtaggcgtctacttagggcctggcctcaccctcatgagagtgggtaggaatggactgactttgagcccatgaagaagggaggctgagaggtcaaaccacaaaacccacagggagagatgggggagatgaaggggagtgagagagaagagactgagacaaagagacagaaagaaccgaaagctagaagcagaaatggggagaaaggacaacagaggcacagagacagggaaaaatgagaagctgcggctgagagggaggcagggaggtgccaggaggcaggaggcagctggggcgctgggagcctggcctcagccaccctcactgttcacagccacatgtagcagaaggccatctctacctcttgttgctgggacctcagagttcccctgaaactcatcccaactcaatgtccctattgcacaggtggggaaaccaaggcccagagaggagatagtgcttccccgaaccctgccccacccctgatctcaggctgtggcagacattcaggcctgtgctcaccggctgtgcaacctcaggtcagctgctcaccctctctaggccttggtttctccatctgtgaaagggtctgggaatgcccagcctttctgggctcagcagaccaggaaaaagggaatgagataacaggcgctcagcctggccagtagaagcggacagtgagttctcttcccccttctcctccctcccaaggccaggaagggcttcaggcctcccatggggctgaccttggtggagcagcctcccccaggccagttcccctcccctccacgtccatcccaactcccagcctccttcccaggctcctgcggcttcagcctggtcaagttgttccgagatagcatggagatggccctgggtaaagtcagtgggggcccagtcttttttttttttttttttttttttaagacaggatgtcgctctgtcacccaggctgaagtgctgtggcatgatctgagctcactgcagcctcaaccttcctggctcatgcgattctcccacctcagcctctgagtagctgggactattaacccatgccaccacgtccgacctgggtaatttttgtattttttgtatagatggagtttcgccacgttgcccaggctggtcttgaactccctgagctcaagcgattcacctgcctcagtctccagaagtgctgggattacaggcgtgagccatgacacccagcatgggcccagccttttggtctggaggcaccaggggtctggaattcacctggatggctcagcctgtcccgactccaacatgccagctgaggaggaaacctttcttccctcctgtccctttgatctttcacctggatggctcagcctgtcctgactccacatgccagctgaggaggaaacctttcttccctcctatctctttggactctcccgacatggcagcctgaaactaggggaaaggccacgggacacctgctggctccagataagtgcccctgccatatcctggtcagtgtcccatgctcctagctagcaggcagccttggtagctgcagctgcaccctcacaggcctgagccgccccgctttgcccacttacctgctggtccagttccccagccgctctgcatgggaggggccagaggcagctcgttttgtataaagctgtccccgcccagagctcggggaaaggcaggcggagggtgggtgtggctcccggcaagaccaggcgcctactatgtgtctctgatctgccctacagcccagctaggaggaggatccagatggtagaactgtataataaagggcttgctttattgaggctctctgccacccagatttcatgagggttgatccccagttgacaaaagctatgtgcaaacagttggttctggcatcaccctgagatctccataattcctttcacacaggaagagagttccctggagcaaaaacagttcaaatactggtgcttcagtaagtcatgtggaaagcggggataataatagtgccctcttcataggacagaaatcctaactgccagtgtgcactgagctgactcagtgtcaggcatgttcttggggcttgagagaaattaatgcatttaatcttcatggccttttggagagatgctattactatccctattttccagatgaagaaacaggcccagagaagtcgagagccttgtgtaggtcacacaccttgtatatggcagaactggtctctgatgcacactgagctaccctgacaaatactgtaaccacctgaggggttctttctgcccactgcataaagaaagaccatgaggctggccatgccacaggggaaatgagtttgttcccaaatcatcttcaaagcttgtaggtgaggggtttttcaaaggcagtataggggaagagttgggggtggccaggtaacaggtgcttgctgctgattggttggggtggagatgaaatcatagggggttgaagctgtgctcctacaggctgaatcgcttttggggggggggccacaggagcagggttggcggtcctggtggagacatcaggtttaggtggagccatgggtgtcaaatctgcaaaaaacctggaaagatggcggggcgtggtgggtcatgcctgtaatcccagcactttgggaggccgaggcgggtggattacctgaggtcaggaattcaggaccagcctgaccaaaatggcgaaaccctgtctccactaaaaatacaaaaattagccgggcatgatggcggacacctgtaatcccagctactggagagactgaggcaggagaattgcttgagcccgggaggcggaggttgcagtgagccgagatcgcgccgttgcactccagcctggacaatagagcaagactctgtctcaataaaacaaaaacaaacaaacaaacaaacaaaaaacaaaaaaaaaacaccaactggaaagatatctcaaaaggccaacctgcaacagtggtgttatttgcaggagtaattggggaagttgcatatcttataacctccagaataatggctggcaatcatttatgtctacaccttaggaggacccaggctcctcttctttccccagcctgatggcctctcattaactttacaaaagtggttgctcacagtgctacggcctgtaagtgcagggccaggatgtgaatgcagactcaaattggtgcctccatggatgtaaaacatattgcacagattctgacacctagtaaatgctcagtgcatattgacttctacaaataattctggcctgcctgttgtgttattttccaagacattcatttacttaacaagcaatcaatcactctccaggctaatgcttggggcgagaggtgagcaggcactagggaaggggccagacccctcgcttagcaggcaggtgttcaggaagtgttgccactgttggggctcaggacatacacacccccaaaatatgactctgggaaaccagaatgtgccacccccaaatacacctctttgacatactttgagctggttattcagagaaactgcagacacaggagtagctctggaaagctattctttggtaaaagaaatttacatctatcaaggaaatctacattagtaaaggtgcctgtatcaggaaaaaggctgctccagaagaattaccctagagactttcttttttttttttttttttaagatacaatttcacttttttttgcccaggctggagtgcaatgctgcaatctcggctcactgcagcctccgcctcccgggttcaagtgattctcctgccacagcctcccaagtaactgggattataggcgcacgccaccatgcccagctaattttgtatttgtagtagagacaaggtttcaccatgttggccaggctggtcccgaactcctgacctcaggtgatcttcttgcctctgcctcccaaagtgctgggattacaggcttgagccactacactggccaccagacagacttttatctgcacaggaagacaaccattatttaccatacaataattcttcccctcaccctcccataactgtgtctccgccaatcccccaaagccctaagaccctattccttaaacttcaatcatctgacccttctttgagtctcatattttgtgggatttccacgcacagatatgtaattaaatatggtttctctcctgttactcagtttcatgtcaatttaattcatagcccagccaaagaaccatgaaaggtggagggaagccatgtttcccttctctatagtaccaaatactttggatctgttaaaaaaaaattgcaggactctaaatttatgatgccaagggagaagttaagccttgcagagtgtgagttatgtggcttgcaggatggccactttcttcttctttttttttttttttgagacggagtctcactctgtcgcccaggctggagtgcagcggccaggctggtctcgaactcctgacctcaggtgatctgcctgccttggtctcccaaagtgctgggattacaggcatgagccactgtgcctggccacaatttcatacttatctctgccaaatactataaggtgtcaaaatttggcatagagggtacaaaactataactcaatccaaacagaataatctttgcttgtataattttttaataatgaaacatcaatattggtttaataaaggcagctatatcttgaactatttagttaaataccctaacttctaatcctgtggccttaggaagtctagtctacagacgtgaaggaagtttctttagggaaaggacttatcatctttgatattaaagaaaagagaatttatataaaaataatcttatatggtaaattcttgttctaaagtaaatgaattggttgtttaaaaagaaggatgtttacaacgagtcagaaagttgaggcatgtcagagattgtgtaaattgtaaaaattttataaaagggaatttatgcaagaaatgttgtacagtttaaaagtgatgagggggccgggcacggtggctcacgcctgtaatcccagcactttgggaggccaacgcgggtggatcacctcaggtcaggagttggagaccagcctggccaacaagatgaaaccctgtctctactaaaaatacaaaaaattggctgggcatggtggtgggtgcctgtaatcccagctactcgggaggctgaggcagaatagcttgaacccagaggcagaggttgcagtaagctgagattgcaccactgcactccaggctgggcgacaagagtgacattccatctaaagaaaacaaaaacaagagcgactaggcctcctgaatgctttataaaatgccaccataactcttaactgtacaacttgcctgctttgtagctgggtaagacctagcacacatggagttaaatgctggaataagtcagaccttatctgcacttctgtctaggtcctaggctctacatctagtacataattacaatctcaaactgactaacaaaagtaaaagttgctaaaagttaacagtgtaacatgtattgttccatagaaagaatctaagataagactgtaaagctgaggctagccgtggaattgtaccattaaatacctatgagtttcctcttgaggttgcaagataacctagggttcccggcctctcagaaagggcattctttgcttaccacagatcagaagccctatacagggactgtgtacacaaaatataaggccagtttccaagggctttcttggcttcgtaaatcaagtttgattccttaaaggaaagcataccattccagtcaaggccttggtaaaaaaaccagtttttccaattgtgtcctgttacaaaagaaaacagattcttattacacttgtgcaaataactatatcgccataacttaagaatactcacagatagtttccaaattctggagaaaatcagggagagagaaacaagtatgctacaaattttgttcatgggagtatactaaattgttaaaagctgttaatagctcaaaagaaaaatttcgaggccggatgcagtggctcatgcctgtaatcccagcactttgggaggccgaggcgggcggatcgcctgaggtcgggagttagagaccagcctgaccaacatggagaaaccccatctctactaaaaatgcaaaattggctgggtgtggtggtggcacatgcctgtaatcccagctactcaggaggctgaggcaggagaatcgcttgaacccaggaggaggaggttgtggtgagccgagactgcaccattgcactctggcctgggcaacaagagcgaaactccgtctaaaaataaaataaaataaagaaaagtttctttgactttgaaaagcaaaacaaagtattagcaatattttaagcaaaatatcaaaaagatcactccagtctcctattagttcagttcgtgcagttaattcctgtcctgcttgatattaatgaacattttagctaagagtcctaaccatttttcctgtattctgatgtcacaatctccaaatttatcagaaacctgcattcaagaacacctgttagagctttatagctgagtataaaacccttctaaagaggatcaaaacaagacaacaattgtttatggatgaccaaaagttttagggtagccatagttaaagacacaattgacaaggaaatctgttacttctgtggcacacaataattttaacataacaattataattactactgataacacacactaagacatatcagaattataggagtctcccataactttggaacacataccaataacatatttatacaaatatggcccaaagaaagccaaacattattttatatttgacaatgcttcctgtatgacttcataccaaataagccaaattttacctttatattagtgtgttattaatgttaaactcaattttaatgttttgatcataaggtcagattttcatggacccttttttttttttgagacagagtctcgctctgtcgtgggcgacagagtgcagtggagcaatcttggctcactgcaacctccacctcctgggttcaagctattcttctgcctcagcctcctgagtagctgggactacaggtgcccaccaccatgcctggctaattttttgtgtttttagtagagatggggtttcaccgtgttagccaggatggtcttcatctcctgacctcgtgatccgcctgcctcggcctcccaaagtgctgggattacaggcgtgagccattgcggctggcctatagaccatttttaaccctttataatttttgtcaaagagcaggttagtgctttaagaaaaacccattgtgcttttattttaatactcaatttacagaaaaactggatgatacacctttaactttagccaagatgtttacacacagtatttcctttacaattaaccttccaaaagttgcttaaaccttcatttttattttattcaacttaaaacaattctttaaccttttaatctaggtaaaaatccacattctcatgcctccttataatctttttaccaaaagtatatgtaaactgttttttcaatagtcttaaatacatgttacactgttaacttttttttttaaggcctacgtaacaaataattattcttggctgggtgtggtggctcacgcctgtagtcccagcactttgggaggccgaggcaggtagatcacctgaggtcaggagtttgagacaagccttgccaacatggcaaaaccctgtctctacaaaaatacaaaaattagctgggcgtggtggtgggtgcttgcaatcccacctactcgggaggctgaggcaggagaatcacttgaacccgggaggcagaggttgcggtgagcttagattgcaccactgcactccagcctgggtgacaagagcgagactccatcttgggggggaaaaaatgggaaactggagagagaaaattacatttcagaaactataacacacctgttattaaattccagtgttgcctaatgttgttcaatttttattactttaaattaaattctaatttttctgactacgagtttccaaaataagctttgttttcttaaagccctatgaactgaaaactagacgtttcagcaggcactgcctctaaacgccccccagccatcacaggaggaaacctcttcactgctggagctgacaactaataactgagcgtgcctggaatcctttgcccccacatctaataagtccatggaacccagggtaattgagatggcatctcttacaagaatcaacttctgggtcaggtgcggtggctcacgcctgtaatcccaacactttgggaggccaaggtgagtggatcacttgaggtcaggagtctgagaccagcctggccaacatggtgaaaccccatctctaccaaaaatataaaaaagttagctgggcatggtggtgcatgcctgtaatcccagttattcgggaggctgaggcatgataatcacttgaacccaggaggtggaagttgtggtgagccgagatcgcgccattgcactccagactggcgacagagcgagactccatcttaaaaaacgaaacaaaacaaaaaaacaggaatcaacatctggatacattacactcgagtcaaagcctggaaagctgaggaagcaacccctgatagccaaaggaacatcctaaatatcagtgtaaagaaataggaaattttaagctcataaaaggtaagtaactgagtgagaactacttatcttactcagtctcacccctacctcaccaaatacttttagatgttcctacctctccttttaagacaaatattaaaactttttaatggaaattattcactacaccaccattgtgggaactgctttacacactctattatttgcagtgggactatgtactacagcaccctcaggatggaatatcagacagagaatctcaattatggtaccattttgcttaattattatcctcatagcaggaataacagttactaacagcaaataacacatgggcctttccagacatgtgcctctgcctgtcattgggtgaggaatgttgtttctatatcaaccaattaggcctagtaagaggtgctgttgaaaaacttaaggaaagggctataccaaaacaaccaaatagattcttggtttaggaacaaaatcatagcatgggtcatcccattcctgggacctttcctaataatatgcctaggactaatgttcttaccctgcctaattaacctttttcaaagatttttaactgacaggatcatggccatttcacagacaactacccaaaaacatccacagacagcgttactgctacagttaatccaagaccagaaaactctgtcccctcatcagcaggaagtagccagaaagaacaccctgcctttcatcctttttataactataaggtctggattgacagagcaggagcattgccatcttggacaagcactgccattctaaagttccccttgatcaaaaaccacctaaatccaaagggcatcagcctaatggctaaggtcagcatgaccataaaccacaaatgacatctctgaccagaaacattccaaccataagttaaagccctccccgaccagagacgtgccagccccaagataacctcccctccaggtggagagatgtcagccccaagataccgtcccttccaaccagagacattccaaccctcaatagacttctcccctacacaggaacattccaagcctgtgataagctctcttacccagaaaccagtaaatacccttagtatgtaagagagagcattcctgactgaaattggacagaggcccctctcaggtttattcttcaaaataaacctgtctttgactgttgagcctcttttcatgtttctttcctctttcttgaactcttacaacacctttgttaggcgcaaattttcagtgctgcaaaagaaatagcactcgaacataaatttaattttctcagcaaggcaattttacttctatagaagggtgtgacttgtggatggaacaatggtgagagcacacctgaacaagggaggggaaggggtttttattcctgatgcaggtagcccctactgctgtgtggttcccctgttgactaggattggaccacacagtctaagctaattccgattggctgttttaaagagagcaggggtacgagtcggagtagcggagtgagtagtttggcgggaaggacagttaggaacaggtgactaaaggtgactcaggtcagtgcaggtgaccaggggtgactcaagaaggagcaggtgatcaggggaatagatgtgaactactgattagaactggtggaaaaggttgtttactgaaactaggggcaaggaggcaaagagaatgagaaagttaaactttaaaatggagaacaaagaacaggggacctgaatatactcatacattggttccttggagaggatctcagaactcattgtacttaacaatttacaggctgaaacatttgaaaaggaatttgttatatcctacaatttccccctttcaattttcatagtacttcctcttcaaactttttaaacatgtcttggcttagctgctcgacttaatcctctaaaagaaaaagcttatctgaataaggtggaggtgagttaaggaagattttagtaagtgctgcttttataagtctttgcactagcccacagatgcatggtatgacataacacctaacaagaatgagtacagctattacggctgcaagagaagtaagaattgaggctgtgatttctttccatttactgaaccccctttctagccaccctgagaaagggttatcgactccagaattttagctagttcattggatagagtggtaagtctttataaggcccttgttatgttcccagtgtgggcagtgttatttgggataaaggtacaacactgagttttaatcataatacaaacaccactttttctgctaatatcatatctggtgccattctgttttcccaggccatctggctagtgggccccaattgttctgctatccctttgacagcatccctggtgtaattaataaactgctgctgattataatagatgtaatttatccagtctacatttttattaatcgtcacccatgaaaatattgacttaaatcctgcagctatttgatctcgggctttaaattcatctggtactcctagtggaactccagtaatgtttatataaacatgggggtcaaacgactcatgtaaggcacttcttttacaattttcttttttatcatgttgacggaatgctagagtgaaagggatggccaattggactagagcacgagtgctgctctaattgcttggcagagtatccagcaatagtgcccctcaatgccaccacacacctgctcagggatgaacaagggcagactgatgggtaagctcttgaaaaggcttggtttcaccgcaccctgttaagtctccaaggaatgctaacttttccccctgccgtgaaagggacaggtgaacttaacatcaggggctggaggctggatggccctccgggctgacccacagggctcttgacctcggggaagagcagtgaaagcgaacagcagtgaaagagttttgcctgactcattgccccggctgtggggttctggaagagagctaccatacagctcatgccctgtccatgagaggaccactcgaggggaaaggggacaatttgggtctctggcctgcctgtcgcacaagcagtcacttttgtttagcatgcgaacagaatatttaatccatttcagccaagcatttacatcctggtactctgtttcaattgctatagtttgttttaaatctataacttctacaacagctactttggttttatcattgggtatataacgaaagaagatctggttagtggagaacttaggagtgggagaagggggtgcaggagttgaggaggcaatgaagcacatttcaaaggatcctctggggtccttccctgagacttctgctcctataccatagaaacggtactctggggagcagaggtggtaatctgtactggattacattggttcatctgacaatggggtggtccatccttgctccttggtagtccataagccattagaccagctaaaagttctgttctaggagggcaagattcctagttcatactgggaccatcatcaatatcttcccagactaactgatcccagttaacagattttcagtctgaggagagccaggaaggacaaagatacttttctgaaggggagagttgcctctggtttggcagatctccacaggtcatcccaaggcaagcatcaaaagtaatagtttggggcgaacttgttacataaagaacgagaagactagcaatagaaggggaaaagaaagagatggaatgtaagaggatcaaacccgttttagctttagcttggttggagttggccctggaatagctgtccatgattctggagggggtggtgctcttttgacctaggtgtgatgagtccatcctctttctgctgtttgaactgtggtctcggtggttagaagcaacaggtagggtccttcccaagccagttcgagtttcccttccctccaacttttgacaaggacacagtccttaagctgatgttggtgtactggaaactgtaggggtggtacctgttctaaaagacctttagttctgagggaagagaaagtggaaaataaaccaagtatataatttctgagaaactcatcttttgttttgaacataggaatgtcagcagtggagtgtaaacagggcaacctacacaacatttcataaggggataagccaacatctctctgaggagcagttcagactctcaagagggcaatgggagagcatctatccatggcaaccgagtctctaagactaatttggttaggtggccttttttttttttttttttttttttttgagagggagtctcgctctgtcgcccaggctggagtgcaatggtgccatctgagctcactgcaacctccacctcccgggttcaagtgattcttctgcctcagcctccctagtagctgggactacaggcacgcgccaccatgcctggctaatttttgtatttttagtagagatggggtttcaccatattggccaggctggtctcgaactcctgacctcgtgatccacccgccttggcctcccaaagggctttttttttttttttttgacagggtctctctccgtagcccaggctggagcgcagtggcgcgatctcggctcactgcaagcaccgcctcccgggttcacgccattctcctgccaaagggcttttttaaaaaatagtttggttcattctttccactcttcttgatgaaggtaggtgccagggagtatgatattcccatgttatatccagtatctgggctaatttcttaatgacatgtacagtgaaatgagtcttattatctgaatcaatgttttctattaatctaaacttgagtataagattttcaactaatgccctgtctatgttattatcagttgtacttgaaaaggaaatagcttctatccaatgagtaaggtgatctactatactaataaatacttcagatgatcagttggaggcatctctgtgtagtcagtctggatactttggaatggccttaagcctggactccttcccccaaggggtaatgttttactaaacaactgtctgtaacctgtttggccagggtataaatcctatgcacccataaactctgatgaatgtgtcacacgaggcttggggcctccaatgggtcctttaatgcagttggaataagacttccctcataaggggtttggataacatttctctctggtctagcaatatccattttccttctgaattctctttagcacctatttttattagtttttaaaccaaagaaagccaaacaccattttatatttgataatgcttcctgtgtgattttataccagataagctaaatttcacctttatattagtgtgctattaatgttaaactcaattttaataaaatcttgtagacatatttattcaattttaatgtctgaccataaggtaaaattgttatagactctttctaacgcttcataatttttgttaaagagcaggttagtactttaagaaaaacctgttgtgcttttattttaatgtccagttcacagaaaaactggatgacacccctttaactttagccaatatgtttacacacagaaattcctttacaattaacatttcaaaacttgcttaaaccttcaaaacaattttttaaccttttaatgtaggtaaaaatccacattcttatgccttcttataatccttttaccaaaagtatattttactttccttacacgccttgaacataaactgtttcttcaatagttttacattcaggaggcctaattacttttaaattatacaacatttcttgcataaattcccttttataacattttccacgactttcacagaccatctttgacatgacttaaatttctgacttgtgaacattcctttctttaaacaaccagttaatttattttaggatgagaatttaccgtataagattctttttacataaattctccttttttcttaatgtcaaagatgataattgttttttcccaaagcaaacttccctcatgtctgtggactagactgcctaaggccacaagattagaagttaggataatacatgttacactgttaacttttagcaaattttacttctgttgaaaaccttgtaagtttggaattttaattaaaggaaggcttttttggtgtccggggacatggacaatagttatttttttggcaactgaaggttatttaatacttgggtgattaattcctcgtggaccgggtcttgacctttgctattaataagacctggttcagtccaaatttttccacatgcatgagccactccaaaggcacactgaaaattggtatagatggttccttcctggttctgtaagtactttaaggcttggctgagtgcaaacagctcacacgtttgagcagaccaattattaggcaattttcctaactctatctctacacctttaaccattgttccctatttctcattcaaacttggacataacggtatgtgaaaaagagcctcttgtgactgttacctctttacaatggaatgttaagcaacccctcagaaagtagggagtagcaaatcaaatctttgtaactacatttcagcctttgccggttgaaatgtcagagccccggcatcagaaagtggtcaactcaagggctgataagaagaatttaccaacaacagtataggtttgaaaagtaaagttttattagaaagaaagaacattgcagaagagtgcagcgaggtgcctcagcaagaggggactgagagggctgtggtggatattccttaggcgcatatatgaaccttaaggcaaaagcttgagggtaatttggagcatactagccacgtaggttatgataaatggttacatttgtagttattttggtgccttaatgtcagcaaggattgcacagtgagtttcgcatagaaattctggttactacaaaatttttgaaagacccctggaaccagatgccaactttagatatgtcgatgaagagtcaaactctgtaaaatatttgaagagatttattttgggcgaaatacgagtgaccatggcccatgacacagcacttaggagatcctgagaacatgtgcccaaggtggttcgggcgcagcttggttttatacattttagagaggcacgaggcatcaatcaaatacatttaagaaacacattggtttggtccagaaaggtgggacaactcaaagtgggaacttccagactataggtaaatttaaacattttctggttgacaattggttgaatttgtctaaagacctgggatcaataggagggaaatgtttaggttaagataaaacattgtggagaccaaggttcttttgaagtcttatagtggctgtccttagagacaatagatgacaaatgtttcctattcagacttttaaaagctgctagactcaaaaaaaaaaaaaaaaaaaaaaaaaaaaaggctgccagactcttagttaatctcagagggcctggaagaaaaagatctagctatattaatagagattatttacagatgcagatttccccccacaaaggacagctttgcagggccatttcaagatatggcaaagaaacatgtttttgggtaaaatatttttgctttcttctttgtcacataatgttatgccagagtcagattggaaagcaagtcagatatataggtttaaataaaacccatctgatgagaatttatggtttgtagggcatgactccccagaccccttagataggaatttcagcaaaataaaaagatcagagcttagtcctcataatcaagaaataaccataaaaatgggcaaccctatggagtagccattcttttattcctttactttactaataaattttcttttgctttgcactgtgaacttgccctggattctttcttgtgtgagatccaagaaccctcttgtggggtctggattgggacccctttccggtaacgattatacttctaaattcctcagataaggagtttttgtctcgggctgcttcagggtcaccaggtgatttttgctctcctcacccctttgttcagcttctctgtttttgcctatgtacacaactctcagatttggccactggggagagcaaagttatacctggtgaccatcaagcagaccattcagagacaaaactccttatcagaactccttattcagaagcaattagacttccctattatctaaagcaggcatctcattccaggcttctttcccccaaatttataagtaactagaatttctatgcatctctggaatgcatgcatatcaaaactcacggtgctgaaaatttgcatctgtaaagaatctctattaacatagctggatctttttcttccaggccctcccaatcctgaagagattaactaagagtctaacaccttttgatggtctgaataggaaacatttgccatctgttgtctctaagggcagcgaacataagacttcaaaagaaccttggtctccacaatcttttatcataacctgaacatgagtctcttgctgatattaaggcattgaaaccacctttgcaaaattattacagacagcatcattgcaggaatccaggacactggagtagaggatgttccatacctttgggttacaagccacccccaggaccttgtcctcattgcaaacaagagggtcattgtgatatggaaggggggcaggggagtgctgggtacagaaatgcagggttcctggtgagggctccacccttgggcctgtgcccacagacctaagtaagaacaggcactcctgttttcatgcctgaatgttgtattttccaagaccactctggcccaccacatccccttcctgtgtccatattgttaaatatgaattctaaatttctcttcaaagaattaatatgtcagtatgttcaattctttgacttctgcttttaaatttaacttcctcgtaaagcaacctttttcgattacctgctccaccctgactcattccgattacctgctccaccctgactcttgcaggttacttgctacctgctccaccctgactaattattctccaccctgcataaccatttttttttcccgccaaagcactcatcctgtcacactctttaaatctgccaattggaattagtttagcctgtgcagtctaaccctagccaataggggaacgacacagcagcaggagccttgtgcattagggataagaacccctttccctcccttgtccaggtgtacactcaccattgctctacctgtgagggtgcacccttctatagaagtaccttgccttgctgagaattaaaaagaaaattttatattcgagtgctatttcttttgcggcactgaaactttatatgtaacaatttgggggctcgccctgattacatttccctctggggcagtctctggttctctcttgtgaggagcgctccgccccctgtggcggcctcagccgggagaaatcagaacccacccagtgcgaggaacaacccgagctgtcagcaacaggggggaagaaaactggccggcaacctagcttaaagaatcctcacatactgcagcgacgactctgcgcacagagcaaggaaggagaagccgcgggagctggtaaagtatttccttggtggtcgggaccaaggtaagaaagccacgggggtggtgggcggtgaagtactccttggtcagggtggcttagaggttaaaaagaggtgagacatccccattggcggagattgaacctcacacaaacctccagtagtagaaaaggcaagaaatttccagtggggaaattgagcctcaccccaaaaggtaagaaatttccagtaagggaaagtgaaccttgaaccttatcccaaaaccatcaagatgggaaatatcccaagcaagacagggagcaagggggataaacatggtaacaaagatatccctccagatggccccctaggtctcatgctaaaacactggaaggataatgaaaggatacacataggaaaaagcaacaaatggtaaaatattgctgttttatttggagtcagggacccatcctcagtccctcaatcttctggtcaaagtttgggtcaaatgagaatgtaatgtgtcagcttctaatccgatacgttaatgataaaagtccagtgtctcaagaagaactaggctatgccctttgttggaggcaaggacctgccctcctatttctcttaaaaataaatagggaagaacccaatctggcacctcaaaatgaaaagtcagaggagccagctctcatgcctaaagactccagtgctgcatggtatcccctagaccatcttcccccactcagtgtccccaaactttcccctcagacagccactgccacctcagatcaccactgccacctcagatcctgttccaaattccccctctactcacgctatccctcctccttataaccctgactgttgggaattaccatcccaccagcctgttctctcccaacctaaagacccctctctaaaaagactccagcgtgaggtagaacaatgtaaaaaagatattcagaatttcctatttccctccgtacctaagaggtcagcccctaccctcttccctttgaaagaggtaccacaagttgggggcgggggggggggcattgactttgtaaatgctcccttaatcagttcagaagtccagaattttacaaaggagcttaaactgctgctggacgacccttacagagtggcagaccaaattgaccaattcttagaacctcagttatacacttgggtcaagttaatgtccatcttgggcatcctcttttcagggtaagaaaggagtatgattcttaggtctgctatggtagtttgggaatgtgagcaccctcccaatgaaaacgttcctaccacggaccagaaattccccgcccaggaccccccatgggaaaataacaatgcagatcaccgggaaaatatgcaggacctaagggagataataaaaggaattcaggaatcagtaccctgaacccaaaatctttctaaagcatttgatatacaacaggaaaaagatgaagggcctatgagattcctagacagactgagggagcaaatgaggcaatatgcaggcctcaatttggatgatccccttgggcaaggaatgttgaaactccaatttttcactaaaagttggccagacatttgaaaaaaaaagttacaaaagatagacaattgggaagaccatcccttaagtgagcttctcagggaagctcagaaagtgtatgtgaaaagggacaaagtaaaacgaaacaaaagacaaaacttatgtttttcaccttccaacagatggctccaaacccaggtacttctagatagagtttccagggagccagaaactataaagggtccgaatcctcttttaaagaaccccagcctccatctggaggaccagggtccttgtctaccaagccccctaaagagtatgggggagaagggttaaagaatcccagaactaaggggaggaaggacaaaataggtgctatagatgtggaagagcagaccacttcaggagaggatgttctgaactaagaaaggagaaagaagccctttcactcatgactttcaaggaagaatagcggggtcaggggctctgtctcttttatcttgagtcccaccaggagcccttgataaatttgggggtgggacctaaacatgagcttatcacctttttagttgattcgggggctgctcgctcctctgtttccccccatctaatgttgtctccttcttagaggaacttttagtctccagggtaaaaggtgtaggattaagagcaaaaattttagaaagcactgaagttagataccaggatcgctcagcttatattcagttcttgtttatccctgaagcaggaactaatttactggggaggaatttaatgttaaagttgggcataggtctacaagtcagcccaagaggattcctcacctcattaaacctactcaccaccgcagatgaaaaatatattaatcctcatgtcttgaccaaagaaggaaaccaagggaaactctaagtccctccgatccacatcaagctaaaaaacccaggggaagtagtaagaaggaagcaataccctattcccctagaaggtaggatagtgttgaaacctataattgaaggccttatttaggatgggcttcttgagccctgtatgtctccttataacatcccaatcaagaatcaagaaatcaagactgctaccagccagtcaagaaattagatgggtcataccagctagtacaggaccttagagctatcaaccaaatagtccagagtacccaccctgttgtcaccaatccttacaccattcttagcaagattccatataatcatcaatggtttactataataaatttgaaggatgctttttgggcatgtcccctggctgaagatagctgagatatatttgcttttgagtgggaggatccatactcagggtggaaacaacaatatcgatggaccgtcttgccccaagggttcacagactcccctaaactttttggccaaattttagaagaagtactagaaaaagttgtcatcccagaacaaatatgccttcttcagtacctggatgacattcttatatctggtgaagatctagagaaggtaactgacttctctacacatattcttaaccatctgcagtttgaggggctatgagtctcaaaaagaaagcttcagtatgtagagcctgaagttaaatatttaggccacttaataagtgtaggcaagcgaataatagggcctgaatgaattgagggaatcgtgtccctacccttgcctcaaactaaacaagaactcaggaaatttttagggtcagtcagacactgtcgctaatggattgactcatatacactgccccgtaaactgttctatcaaaaacttgcccaggagaagcctaaccgtctcctgtggacttctgaggaagttgatcaaatcgagaggttggaggaaaggctcataactgcccctgttttaggcttaccctccctagaaaagccattccacctttttgctaatgtggacagtagggtaccttcgggagtgctgactcaagaacacagaggccgccagcagcccgtagccttcccatcaaaggtcttagacccagtcacttgtggatggcctcaacgcatccagtccatcgctgctatggcaatactaggtgaggaaagcagaaaattaaccttcggaggaaaattgacattaaacacgcctcaccaagttagaactatcttaaaccagagagcagtgagatggcttactgacttgagaatcttaaagtgtgaggccattctgttagaaaaggatgatttaacattgaccactgataattcactcaacccagcaggtttcctaacagggaatccacatctaaggagggaacacacatgtttagatttaattgattaccatacaaaggtttgaccagacctgggagaaacccccttctggactggacggcacttactcatagatggttcctcccaggtgattgagggaaaaagacacaatgggtattcagtgattgttggagaaactcttgtagaaataaagtcaggaaaattgcccaacagttgatctgctcaaacgtgtgagctgtttgcactcagccaagccttaaagtacttacagaaccacatctatacagattccaggtatgcctttggagtggcccatacatttgggaaaatttggactgaacgaggtctcattaatagtaaaggtcaagaccttgttcacaaggagctgttcacccaagcattgaataatcttcagttgccggaagaaatagctattgtccatgttcccggacaccagaaaagcctttcttttgaaagttgaggaaataacctagcagatcaggtagccaagcaggctgctgtgtcttctgaaatgcgtgtttttcacttaactccctacctccctcctcctaccataatccccattttctcttccaccgaaaaagagaaactaataaaaataggtgctaaagagaattcagaaggaaagtagatactgccagaccagagagaaatgttgtctaaaccctttatgagggaagtcgtatcccaactacatcaggggacccattttgggccccaggccatgtgtgacgcagttctcagagtttatggttgtataggaatttataccctggcaaaacaggttacagatagttgcttagtatgtaagaaaactaatagacatactataaaatgattacctctcaggggaaggaatccaggctaaaggccattccaaagtatctaagttgattacacagaaatgcctctgatagatcatctaaaatatttactagtgatagtaggccacctcactccctgggtcgaagctatccccttttcaaatgcaacagccagtaatgtagttgaggccctaattgaaaatatagtacccaggtttcgactaacggaaaatactgactcagacaatggaactcatttcaccacacacattattaaaaagctattccaaaatattagacattagatgggaacaccatactccctggcacccaccctcatcagggagagtagaaagaatgaattagactctaaagaaccacttaaccaaattagtcttacagacttggttgccatggaccaagtatcttcctatcaccctgctgagaatttgaactgcaccatggaaagacattggtctttctccttatgagatgctctatggattaccttatttgcactccactgttgatattcctacctttgaaacaaatgatcaattccttaaaaattatatacttggtctatgttctactttctcctctcttaaaactaaaggtctattagcacaggcaccacccttggagttcctggtgcatcaacattagcctggggatcacgtcctcatcaagagctggaaagaggagaagcttgagccagcctgggaaggtccttacttggtgctcctaactactgaaaccgcagtccgcacagcagagagaggatggactcaccacacccaagtcaagaaagcaccgccccctccagagtcgtgggccatagtcccaggggaaaaccctactaaactaaagctaagaagaatttaactccctttcatctattctattactcttttttctttcctcactctattgctgaccatatagttattaacataaccaagtcaatttcacctcaactattgcatttgatgcttgccttgttatatcctgtggggatttgtcaagccaaagaaagctctctacttcagatacctctgtccctcctggctctcctcagactaggcattagtgaatcgggaccatttaatctggggagatttctataaagatcccagtggcaaccaggagtcttcccccagtgatgtagagcttttaagccatagttggtccaaagttctgtggaccattaaagagcaaggatggattgccccaaccagtttttgtaatttcctaaattcatacattcgttttactaaagggacagtgcccactaactctcagctaaaccagtgcaaccctatacaggttattattttgagcccacaaaattcttcctcttttctaagctggttcccttctttaagccagttttatggtatgggggctgaagtttcagggacagaccctattggattctttgaaatgcacttctttgatcccctgctgtctgcacctgcctctgagcctttttccaaaacctctcacaacggaaccattgttcctcctctatctaacgacaaggccaagatagcgatggtagaagttaaagacttaaaacaaactggcaattgagacaggataccaagatgtaaatgtttggttggaatggatcaaatatttcatccacacgttaaacaaaagcaattgttatgcttgtgcgcacagcaggccagaggcccagattgtcccctttccactagggtggtcctccagttgaccgggcatgggctgcatggtagctcttttccaggattctatagcctggggtaagaagttgtgccaagctctctctctgctatatcccgaagtttgacaccttgtgggtcagcccccaagggccatccagcttccatctcccaacactaagtttacttcgtgtctctcatgacagggaggaaacttagtgttccttggagacctgaagggatgcagtgagcttaagaacttttggccaggcgcggtggctcatgcctgtaatcccagcactttgggaggccgaggcaggcggatcacaaggtcaggaaatcgagaccatcctggctaacacgatgaaaccccatctctactaaaaatacaaaaaaaaaaaaaaaaattagccaggcgtggcgtcatgcgcctgtagtctcagctacttgggaggctgaggcaggaggatggcgtgaacccaggaggtggagcttgcagtgagccgagatcgtgccactgcactccagcctgggcgacagagcgagactctctctcgaaaaaaaagaaaaagaactttcaaaagcttaccaatcagccagcccttgttcatcccctagcagaagtgtggtggtattgtggtggacctttactggacactctgccgaataactggattggcacttgtgctttagtccaactagctatccctttcaccctggcatttcatcaaccagaggaaggaaaaataagacatcgtaaagtgagagaagccccttatgggtctttagactctcacttctgtttagacgcaattggggtcccatggagaatacaagatcaatttaaagtctggaatcaaatagctgcaggatttgagtcaatatcttggtgggtgacaattaataaacatgtagattggataaactacatctattacaaccaacagtgatttagtaactacactagagatactgttagaggaatagctgagcaagtaggggctacaggccagatggcttgggaaaataggacagccttagacatgatattagcagaaagaggaggggtttgcatcgtgactaaaactcaatgttacaccttcatcccaaacaacattgcccctaatggaagtataacaaaggcattgcaaggtctcactgctctatccagtgagttagccagcagctcaggggtaaatgatccctttacaggatggctagaaaaatggttcggtaaatggaaaggaataatagcctcaattcttacctccctcgtagctgtaataggtgtacttattcttgtcgggtgctgtgtcataccatgcatccgtgggttggtgcagaggctcgtagaaacggcacttgctaaaacctcccttaactatcctccaccttatccagagaagcttcttcttttggaaaatcaagcagaacaactaagtcaagacatgttaaataagtttgaagagaaagccgtaagaaaaatgcaagaggaggaagttgttaaatatgaattctaaatttctcttcaaagaattagtatgtctgtatgttcaattctttgccttctacttttaaacttaatttcctcataaagcaacctttttcgattacctgctccaccctgactcactccgattacctgctccaccctgactcactccgattacctgctccaccctgactcactccgattacctgctccaccctgactcattccgattacctgctccaccctgactcattattctctgccctgcataaccattattttcccgccaaagcactcaccccatcactctctttaaattagccaatcggaattagtttagcctgtgtggtctaaccctagccaataggggaatgacatagcagcaggggccacatccttcagggataagaacccctttccttcccttgtccagatgtgtgctcaccattgctccatctgtgaggttgcacccttttatagaagtaccttgccttgctgagaattgaacagaaaattttatattcgagtgctatttattttgaggcacagaaactttatatataacaatataaacccgagaccttggcgggcacacacacaagcagctgaatgtcaagaggagtggaggaacggagtggcagagaatggcagagagcgctggagagtggcagagcagcatggcagagagggagggaagaggcgtctgaactttggaagacacctccactcctcaataaagtctccgcatgtatcacttttcaaacagttcatgtgacctgattaatccaggatgccagacaagaatctggggaagttaacattcaggcatccctggatggcaaggctaaaggagcacactgtaacatatgcccacttgggctccagcacctgtccatctgtgtgttcccccttccctcaggggtttgagcagtggggtgaccaaacagacgagccacaccccctgttgcatgtcctgcaaggagaatcagggaactctcctgtttcagttggaagagcaagtgtccctctctctctcgtggtggggagacatctcttccttctgggctgtcacagccccaacctcaccaacctacctgacaagggagtctggcagaacaagggcaagggcagggagaagcacctctaactctattcctggataataatcaagtctctaaaagtcatcctggagccgggcacagtggctcatgcctgtaatcccagcactttgggaggctgaggcgggtggatcacctgatgtcaggagttcgagaccagcctggccaacatggtgaaaacctaactctactaaaatacaaaaaaaattagctaggcatggtggcaggtgcctgtaatcccacctacttgggtggctgaggcaggagaatcacttgaacctgggaggcggaggtcgcaatgagctgagactgtgccactatgctccagcctgggtgacagagagagactctgcctcaaataaataaataaataaataaataaataaataaataaataaataaataaagtcatcctctagggctttgaggccgttcaagcccctattttttccatctctgtggatgagcctctgttaaatctgattgtggctgaacaagagataatgttcctaatagatacagggaccagttattcagctttaagtgtttattacagcccaatgtgctagtcctccatttcattacgggtattgataaacttcagtgaggctgtttcacactgccactcccttataaaatgaaaggctattcctttacccactcttcagtcctgccaagctgccctgtttctttattaggtcacaatttgctcacaaaattacaagcgaatttacagttaagacctcacattctagctgtaattaactcacacttcaccaaaaaagttgctgcagtctatagaacatcacattttaaaacaagtgccggccaggcgcagtggctcacgcctgtaatcccagcactttgggaggccaaggcgggtggatcacttgaggtcaggagtttgagaccagcctggtcaatatggcgaaaccccatccctactaaaaatacaaaaattagctgggcatggtggcacacacctgtaatcccagctactcaggaggctgaggcaggggaatcacttgaacctcggaggtggagattgcagtgagccaagatagtgccattgcactccagccctggcaacaagagtgaaacgctgtctcaaaaaaaaaaaaattgttcttttgtttgcttttctttcaccctgattcctccttccccctttgccgtcttcagtaccaagctacaaagctaggggtggctgaggacagtaaacagagtgtggtcttagctggctttttccctcctgggaagttgttgtttaggatcctaattctagttcagaggtgcattctaaatagtcttctccattgcctttccccccaaaattaatctcacacgttggcttgtgtgtgcattcacgtgaggaactgaactgtcattttcatagataaataagagactgagtttccttagctccaaagagaaagggcattttgctcctcccagcagaaaggtacccgagtgactggggggccttgcgggagtgttggggggttgagcccccagcgacatgaagtgattctgcagggaactcacaacaaaattagttttaaaaaggctcgtccaggaagcacatataggaactggtcactctgagttttgagccctcttggaggtgctagacctccggagaaaacactgagacacctaagagggtggtggcaaggattcagtggtgacacactgtggagtctcatctgcaaccattacacttcgacctactccacaaaaaccctaggccacagctcagttactccttaaaagaaagtgggaaacaaataatctaagaataaggaaaaacaaggtgttgacgaaaagagttaaactgtgtaaaatagttgaagatatttattcagagcccaatatgagtgactatggcccgtgacatagcccttaggaggtcctgagaacacgtgcctaaggtggtcggggctcagcttggttttgtatattttaggaaggcatgagacatcaatcaaatacatttaagaaacacattggtttgattcagaaaggcgggacaattcaaagcaggggtcagggtgagggtggcttccaggctataggctataggtaaatcggtaaatttaaactttttgttttgttttgtttttttgttttgagacagagactcactcttccacccaggctggagtgaagtggcacaatctcaactcactgcaacctccgcccccatgggtttcaagtaattctcctgcctcagcctcctgagtagctgggattacaggcacccaccaccacgcctggctaatttttgtatttttagtagaggcagggtttccccatgttggccagagtgatcttgaactcctgacttcaggtgatccaccggcctcggcctcccaaagtgctaggattatgggtgtgagccaccttgcctggtctaaatttaaacattttctgattgacaattggttgagtttgtctaaagacccgggatcaatagaaagtaaatgtttaggttaagataaaagactgtggagtccaaggttcttttgaggtcttatattggctgcccttagagacaataggtgacaaatgtttcttattcagacctttgaaaatgtgctagactattagttaatctcttcaggattgggagggcctaaaataaaaagatctagctatgctaatagagattctttacagttgcaaattttcccccacaaagtacagtttggcaggaccatttcaaaatatggcaaagaaacatgttttggggtaaaacaattgactttcttcttggtcatgtaatgttatgccagagtcagattggaaagtagtcatcatatataatgttaaataaaatccatctgatgagaatttatgatttgtagggcatgactccccagaccccttagataggaatttaggcaagatagaaaaaatcagagcttagtcttctcacaagagaatgaccctcttttaggtaccccattgattttacggcatctctactttgcaagtgtttgtgtaaatggacatattatggtctctttgtgcacaattatgtcaaagacaatttagagcttgaaggttgacctccagctgtaaagttcctaagttctctatctctctgctttcttttctgcctgttttaagtctgctattatttttctttctttttttgagacagagtcttgctctgtgcccaggttggagtgcagtggtgcaatctcagctcactacaacctctgcctcccaggttcaagcagtcctcccacctcagcctcctgaatagctgggactacaggcatgtgccaccactcttggctaatttttttttttttttgagacagagtcttgctctgttgcccaggctggagtgcaatggcatgatctcagcaaaccaacgagtttctattaatatctcatggctagagttctgagataatagctataggatctttggttgtatgagtatgtatgtgtgtgtttatgcatacatacacttatttcattgtgttttctagccacaggtactgaattggcttaaagttaaagaatattcataaattaataagcctaaatgcttttcaagttcatgtgacttaagtaaaatctttaataagctagctttaaaattattggtaaagtaatattagaaatgtcttaaaaattgttagcataaatttttgtttgcatttattgatcaagggacttcatatactgccaaatactgtaaggtgtcaaaatttggcatagggtttgtaaaactacaaaaccgttcaaaacagaatgatttttgcttttgtaatttttgataaataagacattgatattggtttaatgaaaacagctaaatcatgaattatttagtgaaataacaatatatttaatcttaaggtttttacttagcaaacacctgaaattcacaggctatcaaatgtttgacagggaaataactttaaatgatgactatcacagttttcataactaacctgggtaaactattaaaataaaatatttaggtaaatgtaatgggataaatacttgtagacaaagttgtcataatttaggatctaaagttatgttaaattaaacaatagatatttcattaactgggtttttttaattaaaaaagatattgcaggaaatcattttttttctaaaaaatgtgttcttgttaaaaggaggataatttttgtctaattcaaagcttatttaaaggttatatataaaataaggtaaaaagaaacaagaaaatatataaagaagttatagaaataaaaaagaatttttggtaagaaagcttaaagaaaaataattttacatgagaaagaaccttgtatggtacatttttgtcctagaataaaatgactggttgtttaagaaagaggaatgttcatacaaaccagaaagtccaagcatgtcgtgaatggtctgtttaagttataataagagcatttatggaaaaagacccacaaactttcatataatcaagttgtctataattaaagggaaattatttataatgatcttttgagagattgggttttgatattaaaaaacatttatacactaaagaattcattagaacaacattttcttaaggtattgatttacttttaataaattacaagactatatatataatatattttttcctgcaaagttcaacttttattgcatctcactgttttcagctttctctccccttttaaagtacctgaaataataactctatctttcaactcatttttagctcctgtaagtttttttattttctcctttgtgttctaactgttgtggcctgacgctaataaatgttttatctttgtggtctaaaggaaacattccttccaacataatatttcctgtagggaacagcggttgaaatgcagaaggtgttttgttttccctttgggaaattggcctaataaacagagtttatgctttattgaaataattcctatgtcattattactaagttttggtttgtttagaaaaaaacccgagattaaattttttttaattaagattattacatacatgtaaccctctgtatgtgcttttaaagtccttgtgccattaagttacagagctttgagtccttggtctaaaaagaacaccaagtcctgctaaatattaaacactgacagcagttaaaacctcattttctgacctggtagaagatgccaatcaaaataaactgtgttcatgagacagaaggccggaaattaaaacgattcaactcctcaaggtctggagactatcaaagaagaggtgggtgcatgagattgtaagggccgattttgagagatcaaatgattataaggccaattttgagagataaaataattgagtttctctataaattaaccattaatctcaaaggcacactgatgcaagactagcatatgggctgctgtgtcacgttaacaaggttttcttggagaattaacccactccttaataaaaggttataaaagaggttataaaggttataaaaaaggcttgtggaatttttatcttgtggtcaggatgattaaaattttatagattgtttatacattttgaaaaacaaatttaattggcctcgtttttattagggcttattgtttaggcaattaagtcttctctctcaaagaatcaaggtttttgccttttttttgaaatctttgagttatcaagttgagtaaatgaaagacttattttacaatgacttgatctgtgatcctattttgtgatatcaagcattttatttatttatttatttatttttgagatggagtcttactctgttgcccaggctggagtgcagtgctatgatcttggctcactgcaacctccacctcctgggttcaagcgattctcctgcctcagcctcccgagtagctgagattacaggtgcctgccaccacacccggctaatttttgtatttttcatagagacagcatttaccatgttggccaggctggtctagaactcctgacctcaggcgatccacccaccttggcctcccaaagttttgggattacaggtatgaaccactgtgcccagccaaatcaagcattttaaactttttatttttatttttaaaattttaatattttgagatggagtctctctctgtcactcaggctggagtgcagtggtgcaatcttggctcactgcaacctctgcctcccaggttcaagcaattctcatgcctcagcctcatgaatagctgggattacaggcacttgccaccacacccagctaatttttctatttttagtagtgacagggtttcaccatgttggccaggctggtcttgaactcctaacctcaggtgatccacttgccttggcctcccaaagtgctgagattacaggtgtgaaaggtgtttaaaggccactgtgcctggcctttaaactttttatatttgacaaactttccaaagtcaaattctaacttggttcctcaatgattttttgatattagtcccctgaagtccaaaagagacacagtcagcttatttggcataaaaatcatacaggaagcattgtcaaatatgtaatagtgtttggctttctttgggctgtatttgtataaatatgttattggcatatgttccaaaattatgggaaaatcctataattatgaatgacttagtatatgttattaatcattatcattattatgtaaaattattgtatgctacagaagtaaccaagtttctttgtcaattgtgtctttaagtatgacttttctaaaacttttgtcatccacagttgttttacttttatccttttcaaaaggatgattttacaatcagcataggactctgacagttgctgttgaatacaggttttggagatagtgacactaaaatagagaaaaaaaatccaacactcccatagagagctgaaatatacatgaatagcaagcagaagaggagttaactgcatggactgaactaatagaagactgaaataatccttctatgactttttgcttaaaacattgctaatcctttctttgtttttcagagccaagaaaacatttattttgagcttttaaaaaatttattattattattattattaacaaataaataatcttctttctttttttcttttatctttctctgcagggcaagttctgtatttatagcttttaacaattgaggaaattatactcctataaacaaaatttggagcatatttctctctatctggtttctctaaaatttggaaactagttgggagtattcttaacttatagcaatatagttatctgcacaagtacaataagaatctgttttcttttgtaagaggacataattggggacagtggtgattttaccaaggttttgactggaacaacatgctatcagatgcagactcctttaaggaatcaaagttgacttacagagctaataaaagcatcttgggaaagctggcctcctatcttgtctacacagtccctgtacaggttcctgacctgtggtaagtaaagagtgtcactttctaacaggcccaggagcccaaagtcttcctgaggtgaggaattcatccaattaatacaggtatttgcaggcacaggccgggcttaagacattaaagtcgaatgtgagattacttatggaataaagttccagcaaagccaattaaaaaaaaaacaaggagcctatatggcaaataattattcttgatgattttatgcaaatactccagccaaatataataagacagaaacttattttgcaaatgaattttgttctataatttgtcctcagtgaaaggggactggagagagaaaaaattatgtttcaaaatcacctatagtacacctgttgttagattttagtctcacttagtgtttttaaatttttattattttctatagtttggactaaactctaaaatttttcctggtcacaagtccccaaaataatttttttcattttttttcttttttcctttccttttccccccacattttttcctgattagaaatcaccaaacattaaactgtgctttcctaaagccctgtgaactaaagctagacaatctatttacatacataagctactttcatacctgcctactggtgtatgaacttcagagtaatatggcctatattgatttcccaggattattgttgttgttgttgtttttctcctttcctcccccattttctcttaggacgtgagacttcacaacctgctaaagcgagctttcctaataatgtggaacctacctgtctatgaataaactgtcctagtcatgagagatcagacaaaacctgagaccagaggctaattttcttctaaaatgcttttaaaaagaaaaggggggaaatgtgaaaggaaaataaacttgggaccctcaaatcactaagccaaaacgaaaagtcaagctgggaacggcatcgggcaaacctgcctcccattctaatgggatagctaaataagatagctacaaagattttaaaaagctacatacctccctcacaattttcccacaaggaaattccttgtgtacctagaacagacagaactcaaagtcatccctctgctcatgggagacaaatgcacatctgatggcttcctttgccctattgcttcgctaagccagactaaggcataagtgactattcctgcaagttgcatattcagtggagggctaatcagaaactcaaaagaatgtaacaatttgtcctttatctacctatgacctggaaaacccctccccacttcaggttgtctcacctttctggatggaattgatgtacatcttacgtatttgctgactgatgtctcatgtctccctaaaatgtataaaacctagctgtgccccaactaccttgggcacatgttatcaggacctcctatggctgtgtcactggtgtgtccttgaccttggtagaataaattttctaaattgattgagacttgtctcagataactcttgatttgcagtaagtagcatttctaaacatctctggaatgcatgcatattgaaactcattatgcaacccttgctgacatcaaggcaggaaaatgtctacaaatgtaatcatttagcgtgacctatgtggctaatgtggaccaaattatccttaagctcctgctttaaggtgcataaatgcccctgaggaaaaatccaccttggcactctccatcctatcttgctgagattcttgcctgcactcttctacagagttctttctttctaataaaactttccttttttcaaaccaatactattatccataaattcttcttctttttttgtttttttgaaacggaatctcactttgttgcccaggctggagtgcagtagcatgatcttggctcactgcaacctccacctcctgggctcaagtgagtctcctgcctcagcctccagagtagctgggattacagacgtccaccaccacgtccagctaatttttgtatttttagtagagatgaggtttcaccatgttggccaggctggttttgaactcctgacctcaaatgatccacctgccttggcctcccaaagtgctgggattataggtatgagccaccatgcccagcagtaaattctccttactaatccacgagtggaccactttccaatgctgaggctctgacacctcgctgggcagccacttttgattattttgggttgtcagggctcagggacacaagaacttgctccttaggggagctggaggtctagtagggattgcttgttctccatcaggcccctagtagggaggcctctcctgtccccaatccctgactcccagggatgctcccctccaaaccacagcaggaagttcctccttaggtcagacccacagccctgatgctgtggtctcactgcaggtcatagtctcacaggggcctcttatattattttaattttaattttaattaaattaaattaattttttttttttagatggagtctcgctcttatcgcccaggctggagtgcggtggtgtgatcttggctcactgcaacttctgcctcccaggttcaagtgattctcctgcctcagccacctgagtagctgggattacaggcatccgccaccatgcctggctaatttttgtatttttagtagagacagggttttgccatgttgaccaggctggtctcgaaatcctggcctcaagtgttctgcctgcctcagcctcccaaagtgctgggattacaggtgtgagccaccgtgcctggtcttatattattttaattttaaatttaagaatacattcttaatatcaaccttcaaagactccctgttgcttaccaagttaagaaaactacttaaacctcacatataattcctttctcaactgggaccaataaaccgtgacagctttattgaagggggccagccccttcacacctgtgggtatttctcgtcaggtgggatgagagactgagaaaagaaatagacacagggacaaagtacagagaaagaacagtgggcccagggcactggcgctcagcatacgaaggacccgcaccggcgccagcctctgagttccctcagtatttattgatcatgatctttactatcttagcaaggggagtgtagcagggcaacaggtggggagaaggtcagcagggaaacatgtgagcaaaggaatctgtatcatgagtaagttcaaggaaagatactgtgcccggatgtgcacgaaggctagatttatgtttctctttacccaagtatctcagtgtagcaaagagcaacagagcagtattgctgccagcatatctcgcctccagccacagggcggttttctcctatctcagaatagaatgaatgggaatggtcggctttacacagagacattccattcccagggatgagcagagaagccttcctcttatctcaactgcaaagaggcctccctctttcactcctcctcctcagcacagaccctttatgggtgtcgggctgggggatggtaaggtctttcctttcccatgaggccatatctcaggctgtctcagttgggggaaacgttggacaatacccaggctttcttgggcagaggtccctgtggctttccacagtgcattgtgtccttggttaacagagaatggagaatggcgatgacttttaccaagcatactgcctgcaaacatattaacaaggcacatcctgcacagtcctaaatccattaaactttgatccaatacagcacatgtttctgtgagcacagggttggggataaagttacaagttaacagcatctcaaagcagaaacaatttttcttaatacagatcaaaatggagtttcttatgtttccttttctacatagacacagtaacaatctgatttctctttcttttccccacactttctcacgtgttctttctttctttctttcttttcttttttgagatggagtctcgctttgttgcccaggctggagtgcagtggcgtaatctcagctcactgcaaactctgcctcccaggttcaagtgattctcgtgcctcagcctcccgagcagctgggattacaggcatgcaccatgacgcccagctaatttttgtattttcagtagagacgggtttcaccatcttggccaggctggtctcgaactcctgacctcaagtgatccacctacctcagcctcccaaattactgggatcatatgaatgagccaccatgcctggcccatgtttttcttgtactttaggctttgctacttacaaccagaactgcttaccattctgtcagaagccttccaaccagggcaactccatcttgaataggggctgggtaaaataaggctgagacccactgaactgctttcccagaaggtcagacattcttagtcacaggatgggataggagtttggcaggactggtatcacaagtacaggtcacaaagaccctgctgataaaacaggatgcagtaaaagaagccggccaaaatccaccaaaactacgatggggatgaaagtgacctcgattcgtcctcactgctcattatataggaattataatgcattcgcatgctaaaagacactcccaccagcaccatgagaatttaccaatgccatggcaacgtcaggaagttaccctacatggtctaaaaaggggacgaaccctcagttctgggaattgcccatccctttcctggtaaaacaatgaataatccaccccttgtttagcatacgatcaaggagtaactataagtatgttcagctgagcagcccatgccactgccctgcctatggagtagccattattttattcctttactttcttaaataaacttgctttcactttactctatggattcaccccaaattccttcttgtgtgaggtccagaaaccctgtcttggggtctggtttggtacccctttctggtaataattctgtaagtatttgtagtacgtctgagccaccaaaatttccatactgatccttccattagaatatcctttctgcctgtctctttctggcaggatctgatccatatttcaaagccagtctcaaatgccaccttttccaaagaaacctatccttatatctttatctaatacaaacagtatatattgggagcctaagaaatgcttgttgcatacatcaatgaatgaaccccaaaccaatgtatttctcccttccttgtaatctccagaaatgtttataaactttgttgttgtttatttgtttgttttatttttatttttattttgagatggagttttgttcttgtcacccaggcgggagtgtaatggcgcgatctcggctcaccacaacctctgcctcctgggttcaagtgattctcctgtctcagcctcccgagtagctgggattacaggtgtgcactaccatgcccagctaatttttgtggttttagtagaaatggggtttcaccatgttggtcaggctggtctcaaactcctgacctcaggtgatccacccgccttggcctcccaaagtgctgggattacaggcgtgagccaccgtgcccggcctgttgctatttatttaatatactttatttttttgagcgattataagtttatttttatttatttatttatttatttatttatttttgagacagggtctcattgtcacctcttgcccaggctggagtgcagtggcacgatgttagctcactgcaacctctgcctcccagagtcaagtgatcctgccacctcagcctcctgagtagttgggaccacagatgtgcaccaccacgctgggctactatttttatatttttagtgcagatggggttttgccatgttgctcaggctgatcctgaactcctgagctcaagcaatctgcctgccttggcctcccaaagttctggaattacatgcgtgagctactgagcccggccttaggtttacagaacagcattccacccatgttatttatgcaggggagcacaccacacacatcactttgcagcttcctttctcctcttatatgtcttacagatctttctgtgttctgtacattgagacactcattcattggcttcactcattcatttgaattcattcctttgttcaacagatatttatcgtcagctctatgtcaggcactatgagaagtgcttgggatataaaactgaacaaaataaacaaagtcctttccattggagagatgacattctagtgtaaggagatagacaatagataataaatacaacaaataaataaatacatggtttagtatgttataagatgctttctgtaggaaaaaagtgagagggacctggagtggagggaggaccgagtggggacaggtgcagggtgggggcagccagtagagcccctctgaggaggagtggatcacaggaggatgactggcaagacctaaaggtggcaagctgtctctggtgctggctctgagagcaggatagctggagtagagtgagggaaaggcgaggtcagaggtgaacctgcagggcaggtggggctccttccgctagcgcatggtgttccattatccagatgcaccaggacaaatgtcgcccactgccattactaggtgcttaccatgtgccatcaagaacaataccgcaggccgggtgcggtggctcacgcctgtaatcccagcattttgggaggccaagatgggtggatcacttgaggtcaggagttcgagaccagcctggctaacatggtgaaacctggtctcgactagaaatctaaaattagcctagcgtggaggcgcactcctgtaaacccagctacttgggaggctgaggcaggagaatctattgaacccaggaggcagaggttgcagtgagcctagatttcgccattgcactccaactgggcaagagcaaaaatctgtctcaaaaaacaaacaaaaacaatactgcaataaacattctgtcagtctgtcattttgcccatggacagaatatctgcagaattaattcccggcagtgaacttgagagagatcacccaattgccttccaaaggagctgtgcctggaccatgggtttcagcacaaagtgctgctccctccaacttgtagactcttctggcaggtcacggtggagctcacattctagcgggagagtgtccagggcagagatattccattccgtgtcttttctcccagggctcgcacagagagggttcacgcggtagtcagtaggtgggcagtgcttggtgaaggcattgatgggtggagggattgaaggatgaatgaatggattaggggctgacagtgccgctgcagttactcaaaggagccaccaggaggcgcagggagcccacattctggagacaaaccttttaaaaaaagcatctggtgacttaacgaccttttcaccaatggcttgtgtggggccttaatgctagggtgagaaaaaggtgggagatggaagaaaggggagtgggtaaaaggacatgtgggagaagaaggcagagagagggccttctgagggggcctccacgccaggtaaggaccgtttagctcccctaagagcctgcagcattgatgcagatcccagcaaagccaaaacccccttatgcccacagttgagcccaaaagcccagaacagaggggaaaaataaatttcaggataggccaggtgaagtggcttacgcctgtaatcccaaaacttggcgaggtcaagtaatcccaagtactttgggaggctgacaggggaaactctatctaaaaaaaaaaaataagaaaaggaatttccaggataaatatgtacagtataatcccatttatgtgaaaaaaaaaatctccacaaataaattcctttgtgcgtgtgtgtgtgtgtgtgtgtgtgtgtgtttgtgtgtgacggagtctcagtctgtcgcccaggctgaagtgcagtggcacgttctcggctcactgcaacctccggctcccaggttcaagcaattctcctgcctcagcctcctgagtatctgggattacaggcgtgtgacaccacacccagctaatttttgtatttgtggtagagacggggtttcaccatgttggtcaggctggtctcgaactcctgacctcgtgatctgcccgcctcagcctcccataaattctacatattagtttggggagtgtgtatttaccacatacacatctacagggaaaatctggaaaggtaaatgtcgaattgacaacagtggttacttttgttattgtgtgtgtagagaggggcaggggacaaaaaggaaaatgaggagtgatcaaaggggactttaattttcttttttttttttgagacagagtctcagctcactgcaacctctgtctcccaggttcaagtgattctcctgcctcagcctcccaggtagctgggattacaggcacccgccaccacgcctagctaatttttgtattttattttagtagagacagggtttcggtttcaccatgttggccaggctggtctcaaactcctgacctcaggtgatctgcctgctgcggcctcccaaagtgctgggattacaggcgtgagtcactgcaccgggcccccaaaggggactttagactaaactgaaacattttaactttccaggaatctgtaaccctgctattatataaccacaaattaaaaattactttaaaaaatgaaaaaaaaaaaaaaaaaaaaaaggctgggagcggtggctcacacctgtaatcccagcactttgggaggctgaggcaggaggatcacgaggtcaggggtttgagaccagcctggccaaaacggtgaaaccctgcctctactaaaaagacaaaaattagcagagtgtggtggcacgtgcctgcagttccaactactcaggaggctgaggcaggagaatcgcttgaacttgggaggcagaggttgcagtgagcctagactgcgccattgcactccagcctgggcaacagagcaagactccggctcaaagaaaaaaaaaaaaggaaaagagaaaaaaaaaggaacaataacaacaacaaaaattaaatgctatcttgtgttgcatcaatagaagtcttacgtgcagctcaagggaggtgacagccccctctgctctgctcagaccacacctgggacctcctttcctcttcttggccctgtcccgtgagaagaataatgacagcctaaggcatgctgggggttggagatggggggaggctggggccatctgcacatgatacagatccaggaatagtccctttacccaagcgggagaaactgggcaggtgagcagcttccaggtgtgtggatggcaaatggatgccagactttaggataggaatccaggggtgcagcggatggaaagtccagcccaggatggggcatagttttcccacccagctagggagggagggtaggggctactctggggtgtcaggagtgccgaagcctgaggtaggcgcaagccaggcagcatggcagcatccttccagagggtgttgtgcagctgtggaaaacaattgctgggaggccggcaggggcagtggtggaggagaccagagcttaattctaggtgagtcacaatagcctcatctgtagaatgagtgaggggtggggcgtagtttcagattttttttttttttttgacacgtagtttcgctcctgttgcccaggctggagcgcaatggcgcaatctcggctcaccgcaacctccgcctcccgggttcaagcgactctcctgcctcagcctcctgagtagctgggattacagccatgtgccaccatgcccggctaattttgtatttttagtagagacggggtttctccatgttggtcaggctggtcttgaactcttgatccgcccgccttggcctcccaaagtgctgggattacaggcgtcagccaccgtgccccaccagtttctgactgattttcttttttttttttttttgagacggagtcccgctctgtcgcccgggcgaagtgcagtggcgcgatctcggctccctgcaagctccgcctcccgggttcacgccattcccgggcctgggaccacaggcgccgccaccacgcccggctagtatctttttttatttttattttcaatagagacggggtttcaccgtgttagccaggacggtctcgatctcccgacctcgtgatccgcccgcctcggcctcccaaagtgccgggatcacaggcgtgagccaccgcgccgggcccagcttctgattttatgcagctggcgggatcttgttcttggtcctttaaggcgaccggagggattgcagttttaaaaactcgccagcagaggtcgccttctgacggatttgaccaaaaaatccattccggtgggaaaggggaacctgcgcctgcgattctctctctctccccctctctccctctctctttctctccccccctctctctctctccctccctccctctctcctcctactcctccctccctccctctctctgtctctccctccctccctcccgctctctcccccctccccctctccccctccctccctcccttcctccctctctgtctctttctttgagacaaagtttcactctgtcacccaggctggagtgcagtggcacgatctccactcactgcaacctctgcctcccggggttcgtgattctcatgcctcagcctcccgagtagctgggattacaggcgcccgccaccacgcccggctaatttttgtatttttagtagagacggggttttgccatgttggccaggctggtctcaaactcctgacctcaagtgatctgcctgcctcggcctcccaaactaagattcatttgttgactaagtgaataaaaggggagacattgaagagggggacccgactggatttgggggtgaaggtggagttgagagtgactttgaggcttctgcttgagcaatgagtggagggtgcctctcctgagctggggaaactggggcagcactgacggaggggacacagctacagaggggagaaccctctcctgccggggctgcgggttacagcctgcactgcgattctctgatctcagggacctcagacttctggggccctgtcccctacctctgtgtatgaccctagctggctgagggctgaaggcttgctgttggctctttctgcaccctcagccttctccttcctcttccctctgcaggactctgtcctgggtccttaggaagagtccaggccccaggacagggaagttgggtcaggcctggacctcacattccctgcctgtcccatgaggtggacagtgagaggacaaatgcctggacccctggccccaaacccaagagcagatgtaccggagaagagcttcttagagcaccaggtgccagggctgcggtggagaatcaggggggcccaggggaaggggctgcagatgagggaggagatagatacggagggcctgtgtgcctcccagatacagggctggctttcccagcccagaaggttctttctgcctttcccagtcttcttccattctcatttcatgttcacacttttggccatacccagggtcagccatgaagattgttctcagaatgttttctttcttccttcctttctctttcttttctttctttcttcctttctttctttcctttctttttctttcttctctttctttttttcttttcttctttctctctctttctttctctctctctctctccttccttccttccttcttttctttctttcttctttctttttttgaaacagagtctcactatgtcacccaggctgtagtgcattggcacgatcactgctcactgcagccttgacctcctgggctcaagtgatcctcccgcctcagcctcctgagtagctgggaccacaggtatgcaccaccatgcccagctgattttttaattttttgtagagatgggggtctcactgtgttgctctggttggtcttaaactgctgggctcaagtgatcctcccgccttggccttccagagtgttgggattacaagcaggagcagcacacctggccaatgttttatttaaatcaactcacttaggttgaattagaataattttagacacacagaagagtgtgtctatataattttgaattatatacccaacactcagatataacattagcattttgccatatttgcttcatctatttctttctgaaatattttaatgtaaattacagatatcatgaattttcatccccaaatactttagtctgcatcagtcaaagatatctaatatttaatccacaatggatttccccagtggcaattcccctaaattgtgttttacagttgacagtggatttattgtaaaaggaaactcgatataccaagtgacaagcaagttatcttctgttataaatagaaaggatccctggaaatggacacagtgtcaggcccagagctgtgggtggagacctgctctctgtttgacataaataggagatcagtggctactaaatctgaagacagggcagcagcaaagaacattttctcacggatgtgatgagacttgaaagggactcagaaagggggtcactttctccaggttggggtaactgttatttaagccagggttcatctgcagcgtggggagccagagggtgaccccttccctaggtgatggaggtggctgaggctccagaagtttccagagaaagatctggtgttcctacaaggccagtggcagggggaagggcactagacagtggggctggagggtgtgggcctgtccctgctctgattttgggcactgcacttttgcctgtaagaaggggatatgtgaggccaggacagggtctcctactctgtccccactcccacgccaaacagggccttgaggactctcgcgacctccatgacccagcttccctcctaccccagccccaagcctgtttttgttcccctccctccctcctgcttgatctttgagcctcagccaggatgttacctcctcctagaagcctgccttggtccctggaatggattaagggactctctcctgggccccacagctgcccaggatcactcagcactgtagtgccctgttggcctttgcctccctccagctgtggacgtacaaagcagacagcgaatctgtcttgctcaccactgtacccccatcccctactgcagcacctggcacatagcagtagtgcggcacacttgttgaatgaataagggatcattactactacgcttcccactcataaatgtctgcctcttcggggggctcagaatgcacatttggtccttcattaactcatttactcacaattttttttttttttttttttttgagacggagtttcactcttgtcgcccaggctggagtgcaatggtgtgatctcggctcactgcaacctctgcctctcaggttcaagcgattctcctgcctcagcctcccgagtagctgggattacaggcgctagccaccatgcctggctaatttttgtatttttagtagagatggggtttcaccatgttggccaggctggtctcgaactcctgacctctcaggtgattcacccacctcagcctcccaaagtgctgggattacaggcatgagccaccgtgcctggctcatttactcacaaatatttactgagcacctactatgtcccaagcagtattctaggcactggaaatggggcaaggctgctgcctctgtggaacttatactggggtgtgggaggcaaagaaaaacaagcaaacatacatatgaaataatttaagatgccactcgtggtgggagggactgacaggagctgctgtggaagagagcattaggagggccttgctgaggggtgactttatttcagctgagaggtggatgagaaggcacctgcaggggaagaagaaccaggggaagggtgttcctgatggagcaacagcctgtgctaaggccccaaagtgagcaccagctgggcgctgagggacagaaccaggcacaggctcggttagaggaggtctgaggtcccagaggagacaagagaggggaaggatgggagggcaggcctgagccgcagaaggccagtggaaggttctgagtgggaagaggatgggataggagttatattctgaaaggtccgcctgtgctgggtggaggatgggtggggacaggcaggagcagcccaggctctgatgcagcctccaggcagagatggaccaggggagcccatttcatatccggcccctgtggagggtctgagggtgttgagcagacaggccctggctttggaagtcctgggtgtctggacccgcctgcctgtggggccccagcagagaggaagggaggcggggctcccagtgcctgttgactcatttgcatctgatttgcatgtgaagcagagagtcaggttgaaagctgggaaggcctgtgccagccctgggtagagggtcttgggtgttagttcccacaaagactctgtcccaggccatgaccttcctgttcaggaggggctctgccttcccttgcctccaacgcccctctggcctggccctgccatctggggctgggcagtgcccacggggacaaggtcgtttccttttaggagaggtctgcatgctatgaggacaaaggccaaatccccaccctcgggaacctccttccccagcaaaatcccatctgtcaggctcagcctctgaccttcgacctctctgtcagcacaggctgcagtgttggggaggggagggtccccacccccaaccctaggggagacccaaacctctccccccagccttctccatctgtccccttcggcttctgccacctgctccgtgtgatccaggccaggtcacctccgctttctgggccttggttcccccacgtgtccaatgtgggtttcccaaataccagtgacttgtgtcagtccacttttgtaattgtagccaactccacttactatttcttaagtgaacttactctccttcacttaaatagatttaatttaaaaagaaatgttataccagctctgtaaatggaaaaccagtttcatctgccacaagtagaaacataataggaaaaaataatgaaatggaaataaaacaatgttactctagtctagcctcaagtgaaaaaagtcagacacaaaaggttacatttatatgattgtctagaaaatgcaaaactagagagaaagaaaacagaccactggttgccagggttggggagagggagctgacaatatcaaggggtgcagaaactttttagggtgatccaaactgttttttgatgatgatggtggttacagattgtatacatttgccaaaaatcaccaaagtgtacattcaaagttggtgagttttattttatgtataaaccacctcaaaaagacaaattttagagaagaaaacaaagaaaaatgccggtttagccccaagtctgaggcttcctctctgttaaacaaattagcaaatagaaggccaggcatggtggctcatgcctgtaatcccagcactttgggaggctgaggcaggaggatcacttgaggtcaggagttcaagaccagccatggccaacatggtgaaatcctgtctctacaaaaaatacaaaaattagctgggcgtggtggcgcatgcttgtaattccagctactcaggaggctgaggcaggagaattgcttgaacctgggaggcggttgcagtgagccgagattgcaccaccgcactccaccctgagtaacagagcaagagactccatctcaaaaaacaaacaaacaaacaaggaagagaaagagggatttctctctctgtctctcaccaactctctaaccctccctagttccatgcaccaaggaaaagctatgtgaggacataggagaaggtggccagccacaggccaagaagagagccttcaccagggactgaatcagctggcacctccatctggtacctctaggctccagagctgtgagaaatagatgtgtgctgtttgagccacatagtctctgatattttgttttggcagccggagcagactcatgccctctgatctcatcattagcataatgcctgtttatagaaccatgctgtgggcaggctctgtgctaaaagctttgccagcatcatttcagagacttgatgtgacatcttacatcgtaggggaaattattgttcccattaaagatgggcccacagtgtggctaagccagtggggcatgtcctcagacctggagtgctcccataggaagctgggcccgattctttctgaaggtgtgagctggaggcagtgatggtggtttgagaggcacgggctgtggggaactggatactgagggcagtccctgtgtcccaggggaagcactctgtgctttcaaggggggcactggcagagaaggaagtgtccctcatcacatcctggagacccaccctctggagacagtgttttcacgatttcttttctttcttttttttttcagacagggtctcactctgtcacccaggctagagtgcagtggcacgatctcagctcactgcaacctctgccttctaggttcaagtaattctcctacctcagcctcctgagtagctgggattacaggcacccgccaccacgcccagctcatttttatttttttatttttcgtagagacagggtttcaccacgttggccaggctggtgtcaaactcctgacctcaaatgatctgcttgctttggcctcccaaagtgctgggattacaggcatgagccatcatgcctggccatgttttcactatttctatggaccgtttcataagtgttgtgtggacatagggctccagggttaaatgtgtttgggaaatgtggtgtaagcaaagagaaagaagtttccactctaatacttctcagagactttaatgtggagataggcatggcgaatctctcactgcgggacaagtgggcaagagaagtgtggatgctgccttctgggcactcacagttggtggaggagacagccaacatgcaagcaggggccacaccacatgtctggaggttggaacgctatgcagagagaccacaggaaccatgggggaagtggggagggatttcccagaggagatgacatttgaacaaagatgcaaaggaagtgtggaaggaggtaagggagagctgtatgactgtctgggggaagagaaacccaagcagagggaacagcaagcacaaaggttctgaggctcaaggttgcttggtgcatttgacaagcagaccagcgccattggctggagctagctgggccgagtgggagggtgataatggatgaggttgaccacggtccgctcccaaaggccatggaattcagagcatactggagagcccttagtgggtttggacagacagtgataccttgggacacacagcctcatgagctcatactgaccaaacaaaccacccaaaatagcagcagaaacaacagccacagggtgcagagggtcattcagggtgcctctcacaagcctgggaagtaggcatgtgatatggtttggctgtgtccccacccaaatctcatcttgttttgtaactgcttcaattcccatgtgtcgtgggaggaacccggtagggggtgattgaactgtgggggcaggtctttcctgcgctgttcttgtgatagtgaaaatgggtctcacgagatctgatggttataaaaatcggagtttccctgcacaggctctcttttttgcctgccgccatccacgtaagatgtgacttactcctccttgccttcggtcatgattgtgaggcctccacagccttgtggaagtccattaaacttctttcatttgtaaattgcccagtctcgggtatgtttttatcaacagcgtgaaaacgaactaatacagcacggttaactcccattttacaggcgaggaagctgaagcttagaaagatgaaagaatttgcttgtgaccccgaacgttccctctggctgatgcattgttcctacctgctctgtttccttgtttatgaagcttgcaggctccatggtcctcaaccctggctgctacacactggaataacctggggtggcagactgtgtctccccaggatggccacaccaatacatctcacatcccacatgcttggccaatagcatatgacagatgtgactgtgggttacttctaaagctaggccataatagccatcgcaaccccaccgtgatctctgggattgctagttctgagggaagccagctgccatgtcctgaggttactcaagaagccctgtggagtaggccatttggggagggactgaggcccccaggcaacatctgtcccaacttgccagtcatgttagtgaactacccttgtccagccttcagatgacacctcatgagaggccctgagagagtcttattgtcccgttcaccattcctgttgccctgtggccagctaatcagcttgtggtggttttcatttcttttttctttttgccattaatagcaatgccaggctgggctcagtggctcatgcctgtaatcccagcactttgggaggccgaggtgggtggatcacctgaggtcagaagtttgagacaagcctggctaacatggtgaaaccctgtctctattaaaaatacaaaaattagccaggtgtgatggtgtgcgcctgtaatcctagctacttctcccaagtagaagggcgtgattcttctcatgcctcatgctgaggcatgagaatcacttgaacccgggaggctgaggctgcagtgagcggtgtttgtgccactgcacttcagcctgggcgacagagtgagactatctcaaaaaaaaaaaaaaaagtagcaatgccatagtaagtattcttctaattaagcccttctgaatcagcttaattatttgcttagggtcaatttctaaatgcacagttgctggatcagagtacaagtccactgatacagcatttaattttttcaaagaattgtgactgggccgggcacggtggctcatgcctataatcccagcactttgggaggccaaggcgggcggatcacctgaggttgggagttggagaccagtctgaccaacatggagaaaccccgtctctactaaaaatacaaaattagctgggcatggtggtgcatgcgtgtaatcccagctacacgggaggctgaggcaggagaattgcttgaacccgggaggcagaggttgcggtgagctgagagggtgccagcttgggcaacaagagtgaaactccgtctcaaaaagaaaaaaaaaaaaaaaagaatgtgactatagctggccgtggtggctcatgcctgtaatcccagcactgtgggaggcaagatggtcagattgcttgagtcaaggagtttcagaccagcctgggaaacatggcaaaaccctgtctctacagaaaaattagctgcgcatgggggcagacacctgtagtcccagctacgtgggaggctgaggtgggagcatcacctgagcctgggaagtcgaggctgtagtgagctgtgtttgcaccaccgcactccagcctgggcaacagagtgaggccttgtctcaaaaaaatttaaaaaataaataaatgtaactatattctccttcagtagcaacatctcaatttaccttctcatgcacagtgtttggaaggacatattttgggatgagttttcttttacttcactaccttattttgttctttcatagaatgcctttaaaatgttactttaaaaaaatagataatacctttacaaggtacaaaatccaaaaggtataaaaatgttttctttttttttttggagacagagtttcgctcttgtcgcccaggctggagtgcaatggtgcgatcttggctcgctgaaacctccgcctcccgggtttaggtgattctcctgcctcagcctcctgagtagctggaattacaggtgcccaccaccatgccctgctaatttttgtattattagtagagatggggtttcaccatgttggccaggctggttttgacctcctgacttcaggtgatccacccaccttggcctcccaaagtactgggatcacaggcataagccaccacgcccggccaaaaatattttataaaagtctttcccccacccctttcccctcagtcagcacaagtagccaccactgggaccagtttctggtggataaatccagaaaagttcaggtgcaagtaaacacacatagagagaacaccctttaaattaaatgaaactaaagaaaacagagccataggtgcacaggagacagagagctgacatctggggctgattgcatcttggtttcgagctgagtggcaaaaatactgctaaggtcaacgttctgaaggaggcaaaacccacacgcagaaccagccataggcctgtcaacaaggcgagatgttatcattgctcatgtgctgggtcaggataaggccatacagaccgcccagttctctctgatctgggtgtagttaatgacagtttatccgcctttttcttctctctcaccactccccatggtgggggaggagaaggactgggaggacttgaatactctgaattggcaccaggtgcttaatatagtcctgaaaatagaagaccaatatgctgttggcacataaagatgcccacaattctagaatctgagtgcgcccagatgatctctctttacatggcctaatttgggatcctgacaagttccttctgccctctgcctcactttctcaatctaggaatgggcctctcggtttttgttttgtctaattttaagctctcggctgtgcatggcagaggcaaacttgaagacgcaagggtcagtgagcagggcctttatccaggtatctcaaatatctcccaaccctgattaaagttacatatctcagagaagaatttggtcaacaccattgttgtcattcctggttaataacagggaagttgaggtctgggaagcaccctagtgatgtgttcacatggccatgtgcttctgtaaaatttaccaatgtaaggcatcttaacctcattctgttaaaaccactatctcctttcattccaacttccctttgcatcagatgatgttggggttggtgtgagcagtttgggcatcttgctaaaaggaccttaacatttactttgggtttagtgggatatatttatattgtttccagtcacttttgtgaaaaattattactaactgacctggtattgaaatggcttccaggaatatatccataccgagcatactgagctgactcaacttgtcgtggcatcaagattcaggatcagaggttatatctcaagatatatgaatggtcctacagcactcagttccacaagactgtgaaggagaggtttgaatgtatacacggagccagcagctagtttatggaaagtattacagatgtgtttgagacaggcagctaataaaaagaatgttatttttctgcgttttgtaacgtttgtgcaatttctcttttttttttttttttttttggagacaaggtcttgctctgtcatctaggctggaatgcagtggtgaaatcatggcttactgcagcctcaacctcctggtctcaagcaatcctccctctcagcctcctgagtagctgggactataggcacgtgccaccatgcctgactaatttcttttttccttttttttttttttttttgagacggagtctcactgtcgtccagcttggagtgcagtggcacaatcttgactcactgcaacctctgcctcccagattcaagtgattctcctggctgagcctcccaagtagctgggattacaggtgcccactaccacgtccagctaattttttgtatttttagtagagatgaggttctgccatgttgtctagattggtctcaaactcctgagctcaggtgatccaccagcctcggcctcccaaagtgctaggattacaggtatgagccaccatgcctggccagctaatttctttttaaaatttttttgtagagctggggatctcgctttgttgcccaggctggtctgaagcccctgggctcaggcactccttccacctcgacctcccaaagtggtgggattacaggcatgagccaccttattgtggtttcttgtctctttctaaccaaatcttcactttattacttaatttcatatctgtaattttttcttaaagaggtctccctagggctggacgtggtggctcacgcctgtaatcccagcactttgggaggccgaggtgggtggatcgcctgaggtcaggagttcaagaccagcctgaccaacatactgaaaccctgtctctactaaaaatacaaaaaattagcgggtatggtggcgggcacctgtaatcccagctactcaggaggctaagacaggaaaatcacttgaacttgggaggcagaggttgcagggagctgagatcgtgccattgcattccagcctgggcgataagagtgaaactctgtctcaaaaaaaaaaaaaaaaaaaaaaaaagaagtctccctaggctgaagctacctgctcaatcttctcttgtgtcttataggatcacaggatcccccttgccttacctcactgttactcccaaacagttctcacatgtttacaagggaatgtaacagagtggatcagagaattcattctggatccagaccgaccttagttttctcatctatataatgggaataatagcaggatctctcgccttagatagtcatgaagtccaatgagatgatgtgtataaagccctaacacaatgtagcagagggcacagggccaggattgatatttagctggtcctcacggatacagcagactccctgtttatgacagtggttggctctgatttggttggtgtccatgccagagtgtacaatcattattagctattgatatattattagctccctcccctgcccacccaggggtttacgcagtaagttctcaattattggcaatccaaacaaagaataaaagacaccagctggaatgaaacagagaagctggttccaaattgagcaattcagactgactgctataaaatttcctcaccttaaaggcccttagagttaattcattctaatccccctaaaaatatacttttttgacatgttcaagtattggaaatttggaaaattcacaaaaacacaaagaagaaattaactgctgtgattatagatgattatacacatatacatatgtatttaatacatatttatgctgtacatagtgttttgaagcatactgtacttcaaaaaaatttgggaggggtgcattggcttatgcctgtaatcctagaaattcaggaggccaaagcaggaggatcacttgaggccaggagttctagactggcctggggcaacatagcgagacccgtagcttgacatggtgatgcgggcctgtagtcttagttactctggaggctgaggtgtgaggattgcttcaacctaggttacagtgagctatgattgcaccactgcactccaccctgggcaacagagctagaccctgtctctaaaaaacataaataaaccaatgtttaatacttagcatttccccctatctttaaatatcttctagctacttcacttttatttttatctttttgagatgatctcttgcccaggttggggtgcagtggcatgatctcagcttactgcatcccccacatcccaggttcaatctattctcctgcctcagcctcctgagtagctgggattacaggcatgtggcaccacgcctggctaatttttgtatttttagtagagacgaggtttcaccacgttggccaggctggtcttgaactcctgacttcaggtgatctggtcgcctcagcctcccaaagtgctgggattacaggtgtgagccactgctcctggtagctacttcacttttaatggctgcataatattcctcatcagaaagtgggaaaaattaggctaggtggcgtggctcatgcctgtaatcctagtactttgggaggctgagttggtagaattgctagagctcaggagtttaagatcagtctgggcaacatggcaaaaccccatccctacaaaaaatacagaaaataccgggtgtggtggtgcacacctgtagtcccagctacttgggaggctgaggtgggaagattgcttgaccccaggagattgaggctgctgtgagctgagatcctgccactgcactccagcctgggcgacagagtgagactccatctcaaaaaaaaaaaaaaaaaaagaaaagaaaaagataaagaaataaataaagtgttaataattaaaagtacttttagagggttatgtcataagccttgacaagacttgttctgtaaagctacccggcatgcaaaaagctcaattaagttagctcctccacaggatggaattatataaccaatccctttcaagaggcattgaagttgtttccattattttgctatgatgaataaggctgagcaatattaatctttgctcatatctttggtcatttcctttgtaaatttcgggactgctgggtatgcacattttaaaattaactcactcatcatcatgcagttaggagaacagagaaaggaaggggcttgcaccgggtcacatagggagttagcgtcaaagtcaggactaggaaccagccagggccctctaactggagctcttccagctggggtcctagaggaagtcccagctggccgcgggagggaggaggaggaagggaaagaaccaggcgccggggctgaagcggcggcaggaagaaggtggggccggctgggaggagcgggcggagctgctgagcagcgcctctccttcgggcgggggaagctaagcggtcgcctggcaaccctggcggcgcgccgttcgaacggaagcgaggaaccaatcaggaagtccggggcgaaccattctggtgtgaaggggggcggcgtgctcacttccccttccacggcgccccagggactttccctgcggtgggggccttcgacagtgagggccacccgctcagctcgaccgcggagggcagctccaaaggggaccccaaaggtgcccacgcggggctggggcctcctgggcgtcgttgggagcggccactaccggcccgggtccgagctgtcagcctctccaaagcctgcgcgagaggagccgggacacgcctagcgcgggctccaggtgagggcgcgggtgggtccgggtgcgaccccgggtctgggggccccgttccccgagcgtctgctgtctgctttctccccgcgtcgtacctgcgtgtcatttcacagatgaggactctgaggctcagagaggcaagtgtcccggcccggcgagctctggcggagaatccagttcaagtctttctgccccacctcgcagccccctagtctagtcacatctggacttgccttgagaggcccagacgggcaactggtagtcattttcccagcgttttatcggcagggacctgtagacccctggctggatcacatatccccgcgccccacactgtcctcgggataccccctttgggcgtctgtctttccttctccgcagtccggggttggactcggctcatttggcgcctttctgtctacggggacagaggaccactctttggggatcggacgggactgacatttctgggctggatgcaggggcagcagattctccagcccccagagccgctgctggcctcttgggaatcatccccagtttggggaagggaatagagccagtccctaaaccaaagccactagtcaccagagactttggaattgggagtggggccggaatccccccaggtggagcagctgacctaggccagaccctgctgtgtctcctggggacaccccctgccccctaggttgctattgtcagtctccttttgtaggtggggaaacggaggttctaagaagttaagccccttttcgaagtcacagtcagacaatgcagtggttagctcctagtccctctggcttcaatcttagaatccttgacacacagaatcatgcattttgagagtcttcaatctcttcataagggagttacatatcctctctcctctggagcctgcccctggctttgggggacaggatctccgaggactcagaaagaaaacaaggctttcttttattctttcaacaaatattatttattgacttcataagccctgctctggttcttgcatgttttggtttttttacttattagcaaatgtatcatcttctcccactgtgatgcaaggcaggggctgaggcaattgagccagtgcaaaatttagggatgcccaaaacctcagtaatcaagactgaaactaacgttcatggaccatttgtgtgttctgcaggcaggaggttaactcacacagccttcatgaagtgcagtcctcccatctctctctctctctctctctctctctctctctctctatatatatatatacacacacacatatatacacacacacatatatgtatatatatgtatgtgtgtatatatgtatatatgtgtatatatatgcatatttataaatcatgaaaccactgccctgtccctgagttgctctgtgacattgagtaagtttcttcagtctctgggctgagctaagaagtcatgatggtgcactcaggcctgggcagagggcagtctaggataggaagtgggcttggctgtggatctgcctccccctcccctttctaatcctgcgtgccaggcccttccccaagaccttgcatgtgttatcttccattctgtcctcactgcaaaatccttcatccccattttgcaacctcaagtgcagacctaggcctagaagatcaacttggtatcagtgggcctagatgtccacatccacacccattccacagcctactcccttctcccttcctaatgttagtgcaaggccaccctgagcaaggctgactcctgggcaggccagggcaccagcgtctgggaggcctccagaaatagctcagggcctggtgtggctctggaggtggcccagctgggtgtccctgacctggacagctgggctgaaattgagctggggctgccctgctggctggccccttgccactgcctggagccttcccaatctcctctggggcaggcaagggcctccccaaatctaggccaggcttctgctgaagggaaagaaagaagcaggtgggaggaagggggcgggttgggtgtagaatgtcatgaaaattataacctttggaaaccacacctcccaccccctcaccaaagaataaaaatcactaacacctcttgagcatttactatgttctaagtactttacaagtatgaactcatttaattccctcaactctgtgatataaggtaattactgctgttcttatttccatcttgcagaggggaaactgagcacaagagaggtttaataatttgcataagataacctagaggtggagtttgaacccagagagtctggctctaaattttacattttttgggggggggggtggggtggggcagtgaatgaattaaaatgtatataaaataaaatttaccattgtaaccacttttaagtatacagttcagtggcattaagtacattccccattgcctctccccccagtgcctggcaatcaccattctactttctgtttgagtgaatttgactactttgggtacctctaggtattataaatggaatcataacagtatttgtcttgttgtgtctggcttatttcacttagcataatgcctttaagtttcacccatgttgttgtatgtgttagaattttcttttttatggcggaataatctattctaatattctatgtatatgccacattctgtttatccattcattccttgatggacacttggattgcttttggctgttgtgactaatgctgctttgagcatgaatgtacaaatatctgtttgagttcctgtttttaattgttttgggtatacactcagaagtggaattgctgggtgatcctatggcaattctgtttaattttttgaggaactactttactgtgtttcacagtgactgcaccattttatgtgtccatcagcagtgcacaaagtgctaatttctcaacatcttcaccaacacttgttattttctgtttgtattttttttttggtaatggccatcttcaggggtgtgatgtggtgtctcattgtggttttaatttacatttccctaatgactaatggtgttgagcatcttttcctgtgcctgttggccatttgttatctttggagaaatgtctgttcaagtgactctgcattgttttttttttttttttttttttttgagacaagagtttcgctctgtcgcccaggctggagtgcagtggcgccatctcggctcactgcaacctctgtgtcccgggttcaaatgattctcctgcttcagcctcctgagtagctgggattataggcccccgccaccatgctgggctaatttttatatttttagtagagacggggtttcatcatcttggccagtctggtcttgaactcctgaccttgtgaaccacctgcctcagcctccaaagtgctgggattacaggcttgagccactgcacccagtcatgactctgcattcttaaccattacctgtgcttctcttagatttgtaacctctgagaatagtggatcagctttctgggctgatgaagccctccctcaggagctgggcactggatgatctatttggttgaatagttatcatagcctgcactttggtgacatttgtcatgcatggacctcatgcagagagggaggcactgttgtgagtcctgttttgcagttagggaaactgagatatggagaagttgagtattttatccaaggtctcatagctaatcattggtggagctaggatttgaatgggttctggagtccatgctataccttacagatatggccagggggatggagtagtgaagaccactgcaggcagcagaaccagtgtgtgcagaggtttgtatatggtggctttggagaaagaacaggacttgggtagaagtggtcagagcccagcttgaatgggggtgacttgaagttggaggaagagtaggacaggtctggaaaggccaggagcacggtgagggtttggggaggaggcttggtgcttagggaccctgtccttttttttttttctcttctcacaagatatttattaattacaaagggaaaataataactgtacagtggagaaatttggcagatactgccttaaccaaggaattggctgatcactaagattaagacaaactgttgttatgagtgggtgtggtaatgtacctatagtcccagccactcaggaggctgaggtggcaggattgcttcagcccatctatttgaggctgcagtgagctatggagtgcactccaacctgggcaacacagtgagacctcatttctaaaaaaagaaaaaagaagccttctgataccatgtactaagaaggacacaacatcacttttgtgttattcttgacagatatgtttaactttctctcctttctttcttcctctctttctttcttctctctttcttactgatataagaaaaagctttatacatttaatatatacctcttgatgagtggccttggcctttgaggtgggctgggtccagaacagccggttgttcaacggtatttcctcgtgtttggtccctgaaggaagaaaattggaagggtgtgatggagctcatggtccagtgggagagacaggaaacgagttatatttcctatcctagataagagtatctaaaatgacaggatgtaatgagtgctcggaagggaataaaatgggtgaaattgctgagggggtctcttggaggagatgacatttgaaatgagatctgaagggggtgagggaagaggttccagacagagaacagctggtgcaaaagccctgaggcaggaaagaccttatgttcaggaacagcagggagggctttgtggccagagcaggaaagaggttggagataagatgggagatttggacaaggactgagtcctggaaggcctgagggccaagtggggagcttggattttttttttttttttttttgagacagagtcttgctctgttgtccaggctggagtgcagtggctcaatctcagctcactgcagggagcttggattttattgtaagggagccacaggagggtttaaacacagcagtaatgagactttatttctgctgggaaaacattgccgttattgcccccattttacagcagaggaaaccgagactcagaaccatgaccagggagtgcttcctaaggtggtttctccctctggggtccagccgacgaggcagtagattccttgggacttccttggggggcacatctggtgagtggccaaagcccaacactgaaaacaccgtctcttccacctcccctccccagatgtgagcctgggttccaatcctggctctaccattaatcagctgtgtaattttgggcacgtggccttacctcttggagcctcagttttctcatctgaaaatgggcataataatagtagccctcacagggtaggtgtgaggattaaattagttaacattttgtagagcttagaacagtgtctggtacaaagaaagtgctcagatgagatttgttcttttcttttttggctgtaagtttattcaatgtgaaataatcctctccaattttattgaggtggctgaccacgtccacgaccacatctgcctctaaactggaattcggttgctgacccagccccagcctcggctttcttgtcagcaccagggggcacagaacaccgtctgtaggtatctctgtcagcttcccgtcttgtgagtcttgcaggtcgcttaccctccagacctttaggccgaggcctgccagtctctggacggctgcggtgtagggtggcaggaacaatctccgggggcagatgtagggtggcaggaacaatctctgggggcagatgaaggtaatcacggagatactggctaccctcattggtaaggtaccagtagaaatgtctccaggcaaactgttccttcacgcagccccgggacttgagagactgcatggccttcatgacgtgaaggttgggcacattcttgtctgccagctccgggtgcttaggcatgtggacatccttcttggccaccatgactccctccttaaaaaggagttcatgaatggcaatccggttcttcttaggcatcagcatcttggcagctgtagggtccggggctggggctggaaaggaaggactgttcttttctttgctattacgaaaatcattattgttgctttgctgttactactattagcgcctgaaggagccttccctccccatcccccatttctgcctccgtggagggctaggcagggctcagcaggccatttggaggatgaaggacttgttgccccgtcccctgtaaagtcagggactggaggaggctgcagtgctgagggggaaggaaagctgatgtgcatcactgccggtctcctcatgccctgtaccctagtcctggcccagctcccacaggcacagacatggaacaggagcctcttcagcctgagtgtggcagagggctggggctgaggcctgggggacagctccttctctgggcctcaggattcccatgaaaaaatggcctatcaaatgttcctacctgcagtgagttataggacttggggtggaagaggtgacagtcacctccctctgggaattccttcctgcagggctgcagtctcatgggattaaatgagggggctctggggatttaaatgagtatggtgcctggcaccccaaaattctagttattgttgttactatgacggctgttgttgccgatgttaaccgttttcacaaggcagctgaggcatgctcaggctcagcctgttccagagggatggactctacacgtgacagcatggagcaccaggagggtcccgcagcctggtcagggacacacagctagaaagtggtggcgttaagccttggtctggagggaaagtgcgcaggctggactccccagagtgattttgggctagtgactcagcctctctcagcctcagtttaccattagtcaaatggggtaacaatagaactcaccagatagtgattgttgggaagattaaaatgggttacccgataccaagaaaaacactttcccgtgcctggcacagtgaacatcacctggcggtcgttctgagtgtcagggagcggggctcagtttgtccatctctaaggtgggtgcgcttgcctgccagagccacggggaccccgcgcgccaggtgtgcggtgggcgggtctcggctcccggaagaacttccctgggtggtcctggagcgggtcggacccagttcctgagccaggccagctgccggcggccggggctcgggttctggcccctgcctggctttccttacccttttcgggtagtacctggaccagcgggttcacttgcccgcggccgccggaagttgcgcaaactcagcttgccggagccccaggtgggccgggccggaggagcgcaggccagcggcgcgggcgcagccgggtacgtgcggaccgcggcggggggcgcccagccggggtagggggcggcccgagcacccctccaccccaggacggcgggaacggggcagggatctacctttcggcttcaagaggaccgcggggatggtgccgctctctccctcatttgagagccaggaggggcggcgaggggcaagggtcacacagcgccctgctagccgaccccccatcccccgccaccgggagtcctcaagcttttccggaattgagggagagcaaaagccagcctggggatctgagttccccccagccctgccccgcggcctctggaggctgacgctggggagctagtggggagggggccaggtggggatgcgcgcccccgggatgcaagccagaagggccggcggttgggggcatccgtgggaggcatttgaatccgtgggtggggcattgggcggtgagaggaggcctcagaggggacattgagtcgcgcttggggacttgggaccctggcttcacctggcgggagccgctgcacctccgtttgcccacccgtgacgtggggctgttgaggtcagctcaccgatcagcctctgtcttgggcctgctttgtccgcggtgtgggctgggacagaccctcgtggggcttgcttagagacccctgcgtgggggtggtctgtggacttggttagtcgaaatcttcttgaagaccaggagcctggttcgtggctccgcctttttgccagatgccgaggaaagccctcgacctgtttgatctctccatccttatcgtgacctggaggctcaggaaggtctatttttaacctcgtttcacggataaggtaaccgagtctgtaaagaggcgaagctgcttgcgcaaggcgcacagcgggcgggtgggcgagccgaaggccggcgggcccgcggcgccaaacccggggttggctctcgcatctgtcccggccccgccagaggggacctcagggccagcagatggggccagaggggctgggggcccgatcggggtcgtgcacggggtttctgccccggccccgcccgtctgacctccttctccctctttatccggatggtgcccgcaagggaactgccactgcggacgggttggactggtttgggaggtggcggcctgggggtggggcagagtttggctggctctgctgtgctcctttcctgtcaggtccttcccacctgaggtctcctgggggtcggccctggtggagcgaggcttcctttcccatccactccatctctcctgccttgggagcagcacccaaggatctattcccaactcatggctgctgcagaggtctccagctggtggttgggggccagatggaggaggaggggacagatatgttcgcagacatattttgtttgctgtatatgcaatgttttaatcattattatcgaatatgctgacagttaagaatctagagtttttatgtactcctggatttccagcttcctggaacaatacacctaccaccttggacccatatgcctgcagcaggcagggtacctagatgtctagttcatccctgatcacccagttcacatctggctcccataaatatttcagttcaataaatttttattgaatattctgccctagtatgtgtctagggcagtatcttgaaactggggtatagtgaacaaaatagccaacccccgcccctacacacacacgcctgccctcatggagctgatattttagggggatagagacaacaaagagtaaaacaaccatacacaaatagagtacttgtgcaggggataaggagaaaaggaatagtgccgggagggggtcaggagtgccggggagaaacaggacgtggtattgagatcagtgccttatttatctattctgggacctgggaaagccacttctctgagtctcagtttctccatctgcacaacgacccacaggcttgtgggaggttatagggaggatggcacccagcagagatccctgcctccccaccccaatccagactcactcccttctggatttttggatgtctaggtggggctgtccaatgtagcttcctaccatggatggaaatgctgtactctgtgctgccaaacacagtggcaactggccacatgtggctattgagaacttgaaatgccactagtgtagctcaggaactgaattttatgtttttatttcatttaaatttaaagttaaggttgaatagccacatgtggctgctggctattgagctggacagcacgggtctagatggcttgaactgtaagccttcttggggaacacccagattaagtacccgccccctccattttacagatgagaatgtttgggacttggtatgtgggttttcttctgtcccatctccaaggggccttgtggggtgactctgtgggcttggcccttccttggaaacagggtcagggttggcttgatgtctggggcatcaggtcctgacacttgggtgaccacgtagacacttgtgcatccaggtgtatgccctcctcccaggtgagtacccattccatggctgcaggcagatcgagggtctgccggatgcctccatgcagggctgtgtgattttggacatttccagcttctctcagcacagcatagctcagggctgatgtttccacgtgacaggcatttgtggatcaccgtgggccatccagttccatgcaggaagctgacggatgtctggactccactggggcgcgggtggagattttctttgctccttccctataagctctgccctttgcctggggcctggcatgtctaggcgggtggatggcacagggcagcttcctgcctggatgggtgaggggtagaggtggtaccaggctccctgtggggagtccaggtggggtgtggggctggagccctttttcttggtcatttaaccctacgccccggtgccagcaccttcctttttggtggtcaggggcagagccacctactcgctgggttaacttaagcaagttgtttgcctctctgggcttcagtttctccatccaaaaaacggggctgttgagaggacctgaggttgagttgactggtgcgtagcacagagcctggagcctcccttgctccctttagcgcgtgccttgccctgtcttttctgctcaggttgcccaggtcgcccaggtcttttttctctagcaccttttttcctctcttggtctcagctgggcctggttctcccggggcaggagggagggggtgtgggtggggcctgaggccccgcagctgctgccttgtgcctgctgattggctccttgtggaggggcgtggtctctaccttataatagggagggcgtcttatcctctcagccgcggctgagcctctttgtctgagcgcgctcggcttttttttttttttctctctccttccctgcagcagtggccggtgtccagctgcctactttctgcccggatctctggctcctcatctctccggtctccgcagactaaagccctcgggatatgcagcagccatgcctgtgcacacgctgagccccggagccccgtccgcccccgccctaccttgccgcctgcggaccagggtccctggctacctgctacgggggccggcagatggtggagcccggaaaccgagcgctgtggagcgcctggaggccgacaaggccaagtacgtcaagagcctgcacgtggccaacacccgccaggagcctgtgcagcccctgctgtccaaacagccgctctttagccctgagactcgccgcacagtgctcacgcccagccgccgagccctgcctggcccctgccgacggccccagctggacctggacatcctcagcagcctcatcgacttgtgtgacagccccgtgtcccctgccgaggccagccgcactcctggacgggccgagggagccggccgtcctcccccagccacccctccgcgaccgccgcccagtacctctgcggtccgccgggtggacgtccgccccctgcccgcctcgcctgcccggccctgcccatcacccggccctgccgccgcctccagcccagcccggccgccgggtttgcaacgctccaagtcggacttgagcgagcgcttttctagggcagccgctgatctcgagcgcttttttaacttctgcggcctggacccggaggaggcgagagggttgggtgtggcccacctggcacgggccagctcggatatcgtgtccctggcagggcccagtgctgggccgggcagctctgaagggggctgctcccgccgcagctcggtgactgttgaggagcgggcccgggagcgcgttccctatggcgtgtcggtggtggagcgcaatgcccgcgtgatcaagtggttgtatgggctaaggcaggctcgggagagcccagcagctgaaggctaggcgccactgggcctggaattcgccacaggacggatcttacagaggcaagtggtccctggacctctcttgcatccattctctagacggccgtgtcagaggctccaccctgttgtgaacttggtatggaggcaaaggcttagaggctggaccagcattgttgggcaaggactgactctccaagggttttgttcttggctttggacacctgagaaccccctcctcccctcccccaatacaaggtttttgacatgagtgtactcctgcttagttcctcttgtggggctgcatttgcggtgctttgccctccccactgtgagtgaggggccaagggatctcctcaatcctgtctccccagcggctctgtttcctccttccttccttggcctctgtcctttgctgacttcctcttccttacccagcagaactcaccctggggtcggggcagtggggaggggcctatccactgctcttcctagtccttggcagctggcctaggtgggcagactataggagggactggttaggagtctgcattgctttgacttccctctccttggttaataaacacaaatgcttgtttctcaagggctgggccttcagactcttctgtgttcacaagagaaagggtgagagaagtcttggggtggggccatcaaaacagtaattgttcaccccgaggtctagtggtggggcatgatgatagcggctggcctggctggagacatgtccccgtggtgggttctcataactctcctggaaggctagcaggcctgcctcatcgaggaggaaactgagatccagccatgagtgagctggaatagagctgggagtaggaatggggtctttcccctgcaccagaaagggagcctgcaggggaaaggccgatggggtgcatagactctccccaaccaggagtgttccatccaagccctgcccagttcccaagggggcaggaagctcggagagggcaaatcctgaacttgaggtcacacagaccatagagtgaggatgagaagtgggagttttggaggaagagagacttggggtggacggcacaaaatgagtggcctccctggcgatcttggacaagccagtttccctctgggcctcagtgggagagttaggcagcacagtcctccttgggttggggcactggtgcattctgggcccttcatgctatattccaatacctggggagaggggaaggaaggggctggcactgggcttcgaggcctcagcttcttccagtctccctccaggtcagttacctactaggacaccccaccttggctagtggagcagctagggctagagctgggcctacaaagggcgaaagcgggggtggcctctctggtgccccacggtgggcgtggagagggggtgggtggcgcttcctttcacaggctgccttggctgcagcactcagaaacaggaagctctaatgggggccctggtgacaggtttgatgtaggttttattttaagcataaagaggagatttccgttggactgttgacaaacatccacatcagcccagctgtccatctctctgtctgtctgcctgtctacaactagcccccaggggcctgggatgggcctgggcagtttggggaaggaagggaaaattgggttctagaagaagatggtgttccagctcatgagactggagctcatgatactggtggggagacaagcatgaggagggtggtgacctacccacaaccccccatggtgcccagcagttttgacaatgcaggagctgggcctccagggtccccatgctgaaggagtgatggtgtcaggagagagaatccaggcaggatctgcagacgtggtgccctttgaggtgtcaaagactagatttcctaggcaaccctgctagaattcagggctagtcattgccccttgctgtgacctggcagcctccgagtaacccaagaaggtggatgggctggctgcattttacatgtgaagaaattgaggttcaggtcacaggactggtgggtgacaccttgtttctgaaggagggtacagtgcttgaatcctcaaggtagccttttgaggaccagatatattgtcagagcaggaggttgagctcagggaaggatagcgacttgtatactgtcacatagcaggtctgcaggacagcctggggtcacactcttgcctgccagacacatcgcagtctggattcctggttctcccagcatgtaccccaccactcttcctcatcttggcagccttttcttctggtcactttattactgagcatctactgggtgcccagcagtggataagacagacatggcccctgtcctagtctggagaagagaatgggcaactaaacattcagcacataaataatcatagaatgtaaagcaggtatacttagggacttctgccctaaaaccagagctgttcccaggagctggaccaggggatagctgaaaagagaacgcctttccataaatccactgggagggtctgttggggagagagcagggagggattcttggaagtggggaaggtgccagattgagtcttctccaatggttatggcttggtcttgggagggctccccctgttccaggattctggagcctcccgccttccctgcaggcctctgtggagggagcagggcggggggcttttgcactcctccctcccccaaccctgcagccttggggatctgtggaaacagcccctctattgttctgcctccagttggagtgtgagccctcggagggcctgcagctgctgccctgtctcctggggctgcccagccctccgaagcagctcccccaggccagcctggccccagctgcctagcccctaattaggcagagatgggatctgctctctgatccatttcccaccagctaattatatacacgtggatttgggaaccaggcaacctggctgctcacttctatcatgaaggtggatgggccctgggaaaggcagccccccccccacagacctcagtttacccttttggcagaggatggagtgtagctgcagaggcctgttccctgtccttggttaaatagttctgttcctgctactgaaacatttaaggagaccccccacccccatcttacctgatatcctgtgtacaggggaccaggaaagggttgaggaatttggctataggtccttgactctaggaccccagggtagggtcataggatatagatgagagcatggctgcagctggctgccaattagatgtgcatataggagggcttacagttgtgctggtccatctgggtggcctgaacacccggccgggtgcggtggctcacgtctgtaatcccagcactttgggaggccaaggcaggcggatcacttgaaaccaggagtttgagaccagcctggacaacgtggtgaaatcccgtctctactaaaaatacaaaaattagctaggcatagtggcggacacctataatcccagctacttgggaggctgaggcatgagattcgcttgaaccctggaggtggaggttgcagtgagccaatatcatagcactgccctccagcctgggtgacaaagaaagactccctctcaaaaaaaaaaaaaaaggagtgaacaccccatccaggtttttaaaaaggtaatattggttgatgggtacagcaaaccaccgtggcacatacatatctatgtaacaaacctgcacattctgcacatgtatctcagaacttaaagtagaataaaaataaaataaaaggtaatattatttttcagataattcactcatatatttcttccaacattttattaagaaaaatttcaaacatagagttgaaagaattagacagtgaacattcatatacccacctactaatgcacacttgttaatatttcactatatttgctctatcaggaatctacccatctctccatccattaatacaacttatttttttaatacaacttattttttaataaagcttttcaaattaagttgcatatatcagtacacttcccttaaagtcactttagtgtgcatgccattagctagaattcaatatttgtttgtcttgttcctctctaggtaacatttacatggaatgaaatgcacagatcttaaaggtgccatttgctgaatttagacaaatgcatactgtaccccaaacccctatcagggtatcaagcattatcacctcagaaagtttccttgcatcgctctcctgccgattgctgcctgcccaccatggacatatttttatatccatatatatcagtactaacaagcagcatcccttgtcctttcctctacatcagcctcgctccccaaaagcaaccacttacaacttcttaaactatttcttctggtactttcctccatatttttaaataacttgcttttcctgctgttttcttgatcaattttaggcatacacacacacacacacacacacacacacacacacacacacatatatatttattttttttttgagacagaatcttgctctgttgccccggctggagtgcagtggtgtgatcttggctcactgtaacccctgcctcccaggttcaagcgattctcctgcctcagccacctaagtagctgggactacaggtgtgtgccaccacgcctggctaatttttgtattttttgtagagatggggtttcaccatgttgaccaggctggtcttgaattcctgacctcaagtgatccacccaccttggcttcccacagtgctgggattacaggcgtgagccagtgtgtctgaccaattttaggcacatattgactgactttctggtctgatgttttcatagtgtggcctccactgcctggctgcctggctttggatcccagcccttcctctttctggctgtatgaccttgggcagtaacttaacctccttgggcctcagttttctcatttgtaaaatgagggtgataataatagtgctgaggttattggattgttatacggattcaagatgtaaaaggctgagaataatgaacatcacccagtgagtagtcaaactttttcttctcataatcattattatcaagaaagatttagcttttggttcccccctttcaattggcatttatcacaattttttgtgaagtggattttagtgttatttatattatgactatgtaaatactgtttcctttcaagccaagtcatatattttggttacatttcctttcttgtacaactctttgttcttcctggagttactactcgctttgctttttttcatttgctgtttcctcttaacccatccttaattctcttaattctttgacaccctcagtctccccatagttaacattacacatcctgaaactcttcaagtgcttttaaagaagcatccccatccatttaaaaaaaactggagccaatttttaaaatagaatctcaaatacaatctgtaaaataaagatttgtgagcatccactatgtgccaggagctgtgctaggcagagtgggaaggtagccaaataggggatatccctgcccatgtgggtttccaagagggatgaaaactgaagctccacacccccagcctctgcatttaccggggaacacctcagcacctctaggaatctcaggacctcagggagcccagatttacttatttgtaaaatgaggatcattttgtcattctgcaatcactccttaaccatgttgtctggggctgtgttgtggctgctgggtatagagcaatgatctccccatcccttgaggggctcacaagagctgtgggatagagcggaggctgtggattgcagcggagcaatgggagctggggagcgggtttcccagaggaagtaccataggacgaagagggtcttggtgggtaagggcagtaaacggctgttatgttccaagggctgtgcgaagaacttccatgtattgtcccatcaaatcctcccaaagacccattgaaaggggtcatatttttatcacaatttcatagatggggaaactaaggccaggagagtccaaggccagggtcacacagctaataagcggcagaggcagtatttgaacctatgcagttgggttcttaaccacacactgcactgtctctcacatccagatgcccagctcctgtccccacctcatcctgtatctgcctcgtcctctcctgtctacccactggtgctaacctctggctcattccatgcccttcgctttattcatccattcattcaacacaaatctactgggcgccttttccacgcccaaccctgggctgggcagtgccagggacatagagcttgggcagtattgactcacccattcccagataggcattgacattgacatgcaagcggccaggaaagttgtctaaataaaggggtgtttggggttgagtgatggctgtgtgtatgtgtgtgtgtgtgtggcctgcaaggggtgtgtgtcagtgtggcagcaacagactttctgtggaggccatttatgaaggcatatctgtgtacccttgagagtgtgttgtctgcagagggtgtgtccaccaggtatgtggatcagtgaggctctgctgcataacaaaccactctaagcccagaagcctaaaaccacttattagcctgtgtgaagtggcagtctggcctgggcttagctgggcagttctggttttacctgggttcacttgccttgctgcagtcagctgagggtgggggctctgggagggcttcactcacatgcttagcagttggcaggctgtttgctggggtgcctccatttgctttgatgaggctggcttgggctcatgcttatggtgacctcagggttccacattcagcaagagaagataagctccaacgcacagtgcattttgagcctctacttgtgtcaagattataaatgtcctaatagcccaagtgacatgtcaagtcagattcaaaggatggagaaatagactctctctctctctctctcggttgtgtttttgttctttgaaaacaagcccggcttgcctggctccatcgcccaggctggagtgcagtggcgcgatcttggctcggtgcaacctccgcttcctggttcaagcaattctcctgcctcagcctcctgagtagttgggactacaggtgcgtgtcaccacgcccagctaatttttgtatttttagtagagatggggtttcaccatattggccagactggtctcgatctcttgacctcatgatctgcccgccttggcctcccagagtgctgggattataggcatgaggcaccgcgcctggcttagaatccatctcttagtcacattacacagggcatgagtacagatatggaggaattattgtagctgattttcaaacaacttacctgtgtgtgcaggtaaagaactagggacagttctcagttttggaaataaaaaaaactctgggctgcagtcctggctcttccgtccttgctgtctgaccttagtcaagttgtctcattctctgagcttccgtaaattggataaaattgaatgaaacgagatgatctttataaagtgcttgtgctactcatttgtttacaaacgcagcacatatttattgaggcctcctatataccaactactggtcccaccccgaggatattgcagtgaacaaaatggaccaaaacacctgctcttgtgaagctcacagcctaggttgtagacagatgttaattgatcatcctaataattgtatgaccattgagagtagattccggaaggagagattgctgacctggccaggttgatctgagaagccaaagatatttaagctgagatgtgaagggtaggtaggagacaacgaggagaagaaagataggagtggaaaatgattctagatggagggcatgtgcaaaggccctgtggtgggaggagtagattccaggaacacagagaaggtgggtggggctgggcctgaagcaccagggccagatggtgtggggctgctggagcctttgaacaatgtgagggtctgtcttgccaggcagcctaaaataaaaccgaaaggcctaactgctccacaaggccctcatgatcggggaccttgttactcctccagtctcccctttacctactctgctgcagccatgctgcctccttcctgttccaggaacaccctggacacattcccacctcagggcctttgcacttgccattgcctttactagtatcgaccctacccagatattctgatgactcattctgtcacttcatttccatctctgcctcttcaaaggggccttccctaccaacccaccacaacccccctgcccctccagctaagcagtcagcatccagcagtctctacttccctggcctggtttatttctcttcctagcacatatcacctcctggcttatattaaccagaggccacattgtctgtttctcttctggatctctcaccagagtgcagctcagcaggcagggacttggccttgctctaggctgtgtcctcagcctcaggggaagagtaggcattccataaacatttgtgaataaagaaatgagtgaaaatgagtgagtgaatgctggaaagaactagctcctggaaattaggaggtctgggttcaagttctagctgggcgatcctttctgttccttggtttctccagttgagctgtgaggcatttgtggtctctagggaggttctaggacaggaaaggagtactccaggctgtggagggggcctatgtaggaagaagggagctggggccttccctttggccttctggcgtttgaaaatagcctagctcagcccctagcttgggcccctaccctccctggggtgccaagctggagccagggggctctgtctggagcctgccagcctggtgccgggctgggatcaaggccacctgacagctgggccaggcagtcctggaaggttcttaagggcaaacagggcatgctggatgtcccagacctccctccccacctattgtccctcctccctcagtgtccaccggcaggataaatcccttcatcctctacaggcctgcagcccttgcagcttgcaaatctttttcttggtttgtttctaatttcacccctgctcagtagctactttactggtgaggacactgaggctcagagatgacaactgcctcactgaggttacgttgcagttatgattcaggcccaagtcttgcccagccctgtcctgtcaccgcgtgcacgtgtgtgtgtttgtgtttgtgtgtgtgtgtgtgtgtgtgtgtggtctcactatcaaacagtgccctcccttaaccaccagtgccccgggtctctgataagatgtgatgactatgagcacctggagccaggtggcctgggttcaaatcccacctttgctacttctatactgtgtggattgctgggccacccccacctcagtgtctgctaataggacaaatcccttaatcctgggcactggggcactatcaggactagcattgtatacattgcacaggttttaaaaaatgtaatctgtaggctgggcacagtggcttacacctgtaatcccagcattttgggaggcccaggtgggtggatcatgaggtcaggagctcaagaccagcctggccaacatggtgaaaccccgtcactactaaaaatccaaaaattcaccaggcatggtggcgggcacctgtagtcccagctactcgggaggctgaggcaggagaatcgcttgagcccagaagctgaggttgcactgagccgagattgtgccactgctctccagcctgggcaatagagcaagactccgtctcaaaaaaaaggtaatttgttgtcaatatttacacatctaaaccattggaagaataatgtatatataaactagctaatgaacacctaccaagccccaagcaccaactgtatgtccagtacagagccagctgctccaggggagttcgttcctgggagggggcatcatgatgaagtgggcgtggttcccatttcctccagcgtagtctcagaagcgggaagccatgtgactgaggttacagccagggagggcagaggcccccggcactcacccctctggggtccaagccccgctggcatgtgttgtgtccctgggtaggtgtgtcactccctgtctgtgtctccagtgttcctgttggcaaatcaggggtgggacggaggtaaatggagaggccctgcccagtctgctgtaatccaggatctcggacttagtggggccaaagcttccaagttctcctgattagtgaggctgcaaaaaatgtttggcatgttattctctcaccgtttaaatgtgggcaagtaacaacttacatgtaaaattacccccatataccaagcatttaagttatttattatatcattgcttacaatagcaaataattggaaattatttgagaaatggctaaagaaactcaggcccaggtacgcaagggaatcctaggcagccctcaaaagatgtcctgcaaacacctgatgtggaatcacaagatacacaacacaggtcagtgaacaaaacaagttgtggcatgatacccacagtgtgctgctgcttgtggaagcaggaacacatgtccatgtactcttgtactggcacagaaccctggagaattatcctgggaaccctgcatgctggctgcccctggggaggggaacccgagggttgggctcaagggtgggaggcaagactcactactttgcacaccttttgaattttgaatcatgtgaatgtgttatctgtgcagaaaaaataaaaatacatttaaagtaaagtgaaagtagacaagaaacctgaaacagagacggacaagcaagcctgcaggcccagccagctaccgcccccgggcaacctcatgccacactgtgggctctgcccagcttggttttgtggctccaccctctacggtcatatttgggtttccacacacacagcacccaaaggaaatcccagctaacgcacatcaggttctgggctgggccacccgccaaggtggttggtgggcatgacaccgccccgggaatggcgtcgtccaaatgcctgagcaatgacacggcctcagatggaatgatgccactgcccacagtctcacaggccctcccatctcgcctttgttctgcagcctccaggtgggtgtatggacactccaaaacagccatccctgtcaatgaatcagcctgcagggactgaattc

SEQ ID NO: 147 - DNA, 516 bp, Homo sapiens
aagaggacaatggatttgtttttattaatttttttgctaagaaagtttctaggtggcaggtgctgtccggggagggggcgtgcgcagcagacacagcagccaaactgtcctttctgcttccgtctgtctgtgccagccctgccgcctgccagctcttgctccctcagagccagaaggttcttggctccaggcttcctggcctggatgctggcagcccctggggagaggacccaggccccctctagtaatggccaccaccctccccccagggcagctggagcctcatctttggcagggtcccctctcccttttccaggagactctgtgcctgtagccctggtcccagtgaacctggcccccaccccagtggctggaacaggaaggccaggaggcagatgggccagggccaggagacagatggcccaatcccctgcccaccacagcagcttttctgagaggcgggcaggggcagggtttgctccccctggtgctgggatgtggtagagacattgcagc

SEQ ID NO: 148 - DNA, 511 bp, Homo sapiens
ttttttttttttttcatgagcagtgggctaccattattaagcacttagtgtttgcccagcatggtacaacaatctggtaggtgggtagtttatctccaatgacacatggggacaagaggataagttatcttgcccaaagtcacacagccagtgagtgttggaagctggattcaaacccagacgtcagattccagagtccattcttttcaaggctggacttgaccccaccctgacccagggcccagatttgagggctctctctgagcccacctgactttcctccagggtcaaggctggctgggtcccctggagccctctcctccacccccacacccagaggacaggctgcatcaggggtcttcccacccccaccccataccaaggctgctggagaggagcctggcccaaggtggcgctgcccctcttggacctccaagaatgccgcatggagcagcccctcagggctgtagtccctctacacctacattgggcccctccagcctggaccccc

SEQ ID NO: 149 - DNA, 434 bp, Homo sapiens
  misc_feature (1)..(434): n = a,c,t, or g
atatcatgaaaaaagatttagagaattacaagagtttaggttaataggaaacacaaatggaggtggaaatttaaaaacaaaggaatggaactcaactctccacagattgaacccacacaggtgtcactgtttactgaattagcaccacttttgtgcagtgaagacacccgtggctgagatttcttaaatctcactttttccatgcttttcttctgacaaactgaccacggagggagagctctcctcccccctccctatcccagactgctgctgctttcctgcaattctggtggtctttttgttgcctcatctgattgagactntggggaaacaacacagcagcaaaccaggacatatattccctctaaaaacagcttgaaaattacaatacanagatctcaataattatgagatgcagngattntttctttttt

SEQ ID NO: 150 - DNA, 880 bp, Homo sapiens
gatcctcaaggcctgctctgccccgtggagacgcttgctcggatgagctcaggaaacagtaccggctgcgtggcaggtctgggtgttgtgtgcgaggacgtggcctttgaacaccgctgtgttctcagaggtccttaggagatatttttttttgtcttagggggactgtgttaagttcagacaaatcatgctgggtgtggagagagtctgaaatacgtcagtgaagtaagtagcagtgagcgattgtgaatgtgtaatgtaaatggaaaaccgggttttaccgtgttaagttattcactagggagccagtcgtagttctttgtaatcctctttcttccaaacctgctttgctgaaagttgcagaaaaggaagtgtgtggagagaaacagaacccttcagggtgggtcagaggacgccatccacagtggattcgtgttcgtttgcaggtggaagcagtgatttttaggacccactgattaaaaacaaacattcccaagtgtctctgagagatgctgtttatttgttaattaaaaagcttttttctctgtcttttaaattatggtttcatgtaataaggatatttttagtgaaaaatggttttcctttcaaattacagaccttttaaaaaaacttaatttgagcgagtaccttttcattgacactttcctgtttctaaccttaggaacagaatagcgttggagacacgacgtttcagttactttgaaacctgccactccattggttgtgatgctcctttacataatttctgggacaaaaaaaaagggggggctaaataccgggggccagttcgtccgtttgtaagggcccaagggggtaaaagaggggggtaaaggggagaagggcttggacccccggggag

SEQ ID NO: 151 - DNA, 514 bp, Homo sapiens
  misc_feature (1)..(514): n = a,c,t, or g
tttttttgctcttagaatagactttattgactttagccaagggcaggccctgagatgggggtccagagagaggggcttggtggggctacgtcctgngggccaggttggttctgaggggtagaaggccatccacccactcgcacggctgctccaggagggcttgccacagctgcttctcctcaggtgtggaatccatccagggcacctgcagcccatagctgctgccggtgcccaggctgaggcgtgtgccccccagctggcggttggccagggccccatggtcccagagggagagctcggcacaagcctggcgcaggtcagcaggcccaaagccatcgtacaccatggtgtgattgaacacagggctgaggctgcgtcgcacaacccttgtacgctggcggctggcctggctgtcatcaggcagcacgaagcattgtacgtaagtgtccagggatcctgcccgcagcggcaggaggtccagagcctccttcacccagaagtgcagctccccgtt

SEQ ID NO: 152 - DNA, 742 bp, Homo sapiens
  misc_feature (1)..(742): n = a,c,t, or g
ttttttaacatgattgccttttatttattatgcaggttgttgatttacatagggagttggagatgctaaccaagcatggagttttcacatggtctatttctgctgagttcagggacttggagacagcctttaacttctggcaaaaagacaatttcacaaaggtgtttaaaaccatcctttggtttttgatcctgagtcagagacggacatgtgcttatgaaagaaggtagagtttcaacccttaggtaaccttaaaagagcaggaactatgttgtgtgtaagtcatgtgcagtatacaaacttgatattaaatgacaaattggaacaatctttctctaggaatgcctctctttcatagaggcatcacagtgagtctcttaaagccttgatctaggtgtgttacagatgggcttacagagtatgaatgcacgataagaaggaaattggatagggagtgaggatatgaaatttaaaagaaggaagaactggaacaaggcataggcctctttcaatttttcgtggtgtgcagctgccaattcttggacattcaagaaacgctggttgacattatcttttttcttcacaatctgatcaacgttgaaagtcccgctggagagcaaatcttcagccaatgtattcaggtccttgagtgcatnctctcgagccaacatctctctcttncatagctgatgcttcttgagtaggtttctgctgaagccaagtcctgggctgatctttatgg

SEQ ID NO: 153 - DNA, 536 bp, Homo sapiens
ttttccaatttgatttttaatgtaattaatagtgatttaattttcaaaggagcaaataattacaaacaagagaaaacattgctgagatggtgcctggttgcttctattcaggccattgctgaactatatagaaaaaaagtatattcatggtgtcttcattattatgaaaatcacagtaatatgactcatcaggaaatcacaataattttatgacagaaacaatatatttagaacgaatctgtcagtatttgactctcttttgagggaaaaataaatgaaaaccacgttctctggaaagaaataagacaagaaatgcccacagttgcattctgctgttgggaatacatctccaaaattcaaggttcaaaggttatcacatttaattttcaacacttatcaccttcttcttctctcaatttatggagatagatttctacgttcattattcgggattattagaaatttccttcagtttgaacaatgcgtaacaagtattctgtgacatgggtgcaaaaagttgtcattttcaatcaagt

SEQ ID NO: 154 - DNA, 653 bp, Homo sapiens
  misc_feature (1)..(653): n = a,c,t, or g
ttttttttttttttttgttaatggaatgcacaaaaagtgctattttaatagagagacacaaaatattacatattcatgggacttagggacaaaactatgccttggaaattttctggaaaatcacataagctccaaagaagttgatacaaaggcagctaaagatcttggtttgatagtggcaattctaccaatacaaatacaaaggaatcaacaaatggacaactctttagattacagttatgacacaagcaatccacaggcattccagtgaaaactgcacagagctctctctgttgttacttgcaaaaggctagcatggaaatatcttgtgttcatgtgaagagttggcccatatttccttgcgtgttatcacaagcaggctaaggggcctccagtccttatgacataattagaggagagctgggaggaatttccagacaacagccaccttcaccagccagcccttttgtctgatggtccacacaaaactcattgtatgagtcagcaggatctagaaggttcacttcctccacagtggccgacagtttagatgaatccttctatatgtttctgaacccagacccagccaggacttgtctctattcattntctgggctggtctaacaggagataataggctagagagagatgct

SEQ ID NO: 155 - DNA, 530 bp, Homo sapiens
tttaagttttccaataaatttaatcaataaaatatatactggaaatatcacataaaaattaacttacacttcaaagattgtgcagctgacaactcccccaaatcccccaaccctcaggccaaacaagataaaaagaaacaagaaaaaagttgtaacatgaaattgacttgttttgcttggaaataagattataaattagtaaatcaaaatcttgacctctcatgataatcgtggtgtgctgcaggcatcacgatgaaggcggggctgtctgcactcctgtgcttgcgacactaatactgttctctccactgcaccggagcacctttgttcggtatatatatgcctttgttacctctgactcacgtcgcttaaagaccagttttgcaaatgttgttttttaaaagcatacttgtcaaaactgtgatgtaagagaataaaatccttggaggccttgatttgaagctgtgaacctgtagcctaccaaggacagtaaaaacattcccgttgtgaacactgctccagaagcagct

SEQ ID NO: 156 - DNA, 655 bp, Homo sapiens
  misc_feature (1)..(655): n = a,c,t, or g
gcggccgccgctcctcccggcaaagcacatactcgctgaactgggaggagtccacaccgcccccacaggacgcagccacgctgaaacccctctggaacagccgctccaggacctgtaccgagttgagccggcagtagccattgagcgggaagcggatgacgtgcgtggggtcctggttccagccggcgttgacggagttgcacatgacgtctccggtctcggggaagacctcctcgatgagggccttctcgccgctgagtgcgatccgctcgcccaagtcgggcgtgacgcgcaccaccaggcagtcacaggcccggctgcggcgccgctgctcctgctcctgctgccagcgctccagctcgcgcaccatgggctggagctgatagtagcgcgcctcctcgtacagcagactgaagtccttaaagtcatccggaagcagcagcttggacgtccgcaggaagctcaggacgtagcggaaaatctccccatcccggtcaatgaaataatgttgcttcaaactgtccaggacgaatgggtcagtgccattgaagaggcggcttatcctggagtcagggtacttggtgagcgtgggccagcttgctgtgtacatgtggccgcccacatcgatgtgcacaggtgcattggnactggtgag

SEQ ID NO: 157 - DNA, 503 bp, Homo sapiens
  misc_feature (1)..(503): n = a,c,t, or g
gtttagtttgaacaatatttaatctctgatgcttcagaaggcactttgagatcttgaagggccttagggttgagtctttgatggtgactatggctccttagggtgctgtgtggatgtacaagagcactggctaaggagaggtggcagcatgcaacaagggtaagaacctcagctctttccctaaatggcaggctgacccggggttagtcacttcccttccccagcagcactgcgtcagagcttctctgaggcccctcttacctctgatattctattaagactggcagaggatgtattgtgtgggttttctatcactggaactgagaaaaatttaaaactacctgcatcagcacagagaagatctgaaacggttcttgggtgtttataaagcccgtggctggngctcccatcttgatgtcagcccagccctggggtcagtgcagactgagatacggagcaggaaagcaggaagaacgggagtagcagagtcagggacgacagca

SEQ ID NO: 158 - DNA, 565 bp, Homo sapiens
ccttttttttttttttttttttttttccagaataccaaagtttattcaaaaagtcaataaaagcacagttttgcaaatttgtctaaaacgccagataatcttgaacaaaaataaaatgtctgaccactccaaaataggaaaagacaatcttgtgcaaatagacatacacagtctaggcattgtggaaactggctgtgttcccagcaagagatactgcaccctcctgaccgagcagtcaggcttccctttcctagccatcctaagttgcgttctaggaaactctggatctcagcctcatctccagctttgcctggaccttgctagggggagggagggacaggagcacagaggaggagaggagagggatgtgatgtctttcttaggaaagaaaaaaaggcacagtgatgagctataaaggtagtgatgagagctataaaggtagtgatgaaagcaaggaataattttcattcaccccaaatcctacggcaagctttgacaatgtaacatctttatcttgtggttaggaaaatggacctagagagattatgtggtttgctcaaaatca

SEQ ID NO: 159 - DNA, 575 bp, Homo sapiens
ctggctcacaactttaattgattgctttccctccactgggcccaccgggtcggcttacatagctcatagctcagtgctgctgaaatagacccagggcaagaaaggtatgaacaaccagtgaatgccactggagcataaatgttcacaaaattgtagagaaggggtgacaagaagcaagcagtggggcagggagtgtcactgatgtccgaaaccccgggtcagaccaacacgcagcacagccactcggccagagagagctgaaccatgccatccttgtcttcgtccagaaggctgaatagtttgaagagggtctccaggcggatcatacaagccacgaagctgtcaaagttgatgccaagcttgctgcacgcattcccgaagggcaatggtctgctgcacctggctgttgagggtgaaacctgccttcctgagggctgtcctcatctcgtgggcatcgatggtgcccgagtggttataatcagtttcccaatagatctcctaaagcaggaaagaaatcccaagtagaaaacaaccattcacggcccctgccagaaccatctccctccaccacactg

SEQ ID NO: 160 - DNA, 497 bp, Homo sapiens
attctgaccaaagcatgatggttattccatttacataggaggtggcattgtagaaaataaaaactttctcaaagagatatgaattaaagaaaagttagagtaaggtgaatacttatttaaacatacctttagagtgagggtaagcccccttcccaacccaaaatgaactgaatgagagagaaaaagaggtccagagtagtttgtggagcgatgtttccatctctaatgccactcagctcaggagcaggcttcagacactgcctttatctttacagaaagccatgggaagggaaatgtctgaggtagagctcagcgttgggcatcatatggctaatcactcagaggtcactaatcactctcccttttcttgtttttcagtgaacgagataattgggagagacatgtcccagatttctgtttcccaaggagcaggggtgagcaggcaggctcccctcccgagtcctgagtccctggatttaggaagatctgatgggctc

SEQ ID NO: 161 - DNA, 500 bp, Homo sapiens
ttttttttttttagaaatttaaaatttagttgaaatataaaataaattattgccagaaacacaaagggcacatgaatacaataggggaaacagcttaatgggtttctgttctctgaaaactcaaggcccatctctgagtgataagagtaccctaacaggcaaagcactctgaggtccgggaccaggaagacagtgctactccacctactggcggtctggcactatctgtaggctggagttgggctggggatggtacattcaaaatggactttggtaaactaggggacaacccagacaaacactgcagaaaggaggaaggactccctttccagcatctcaaattcaaggctccaagttactgggcttgggcaaagtcacacattttctcaacaaaggccaactgctgacaatccaaattttaaaaacactgccattaggccaggcgcagtggctcacgcctgtaatcccagttctttttttaatgaaaagaatttgacatt

SEQ ID NO: 162 - DNA, 787 bp, Homo sapiens
ctgcagcaggagcaggagctgttacccttctaatccccacaatgaccccagcctaataatacaatgatccccaagtagaaccaggggcccaaggccccctcgtcagctgggctcccacctccaagctgacgccctcaaccactctgctggggtgagcaaacccaggccccacagctggctagcgggacatccgtgtccacgattggcgccatgtgttttaagttgcagcgtcaaaaacatgaagagattgctttagcaaatatttacccagtcctgactctgcacatggcatcgttctaggagcccaaagatgttaacttgtttaataatcaagccctgtgaaggagtttatagcatctgtggattttggtacccacggaggtgctggaaccaatcgttgaggattccaaggacaactctatgatgcaggcacacctgtcctagctgctcaagggtcgtgggatgcaggtggcacggtgcacgccaagatggctgtgtccacagaggagctggaggccacggttcaggaagtcctggggagactgaagagccaccagtttttccagtccacatgggacactgttgccttcattgttttcctcaccttcatgggcaccgtgctgctcctgctgctgctggtcgtcgcccactgctgctgctgcagctcccccgggccccgcagggaaagccccaggaaggaaagacccaagggagtggataacttggccctggaaccctgaccctgtgtctcctgcccggtggcagtaacaaagccttctgtctgccc

SEQ ID NO: 163 - DNA, 514 bp, Homo sapiens
aaaggcaaagaaggtttttatttaagtgacaacatttgagagctaaaaaccagctcacatcaaaatcaagacccagttgttgaaatcttttaactccataatgctgtttttgtcttgttagaaatctgatatcttacattagcgtttctaacggattttgtacaaggcagccataaggaatataataaacctttttcaccacagaaccatctgtcacagataatactgaaagttacacacttaggaacagtcagaccacagacaaggtcagactggctgccaccaccaagtaaacaactagaaaaggacagcggggtccaagggtgggggtccctgtgcacgagtcgccctcctctggcctgccccccctcgggtcacctgcttctcctttgccccaaagagggtggagtcaaatgcagattttcctcccaactgcctgttagtgtctcaacaaggagagcagagcccaggtcaggcctcactgcttggacttaaccctaactatgatttttac

SEQ ID NO: 164 - DNA, 571 bp, Homo sapiens
tagtgactcagttttttattgaataaaatggcctacagcctgatgacagtaatatggcccttgggttttgaggaaaatatcatgttgtaggttggccaacaaggagatagcagtccagctgaaatttgttttcttatactggctttaaggcagtgattagaaaaggcctaagaggtgggttctgtaagggattgctggaaggaaagtaggaatatggaaagtcatgagacatatactgtcatctcttcttgcttcctctcaagtcacatgcaaattcagggagagttagtatgaaacacacaatggaaatttgggctctaacatatgcaatctgattcttcatggacttcatttggccatatcagttccaacaatttcagccaatgtttaaaaatcttataagcagataaaattttagtgtttcaacaagccatttcctatctttcattctgaaaatccattttaagtcatttttttaacagcataggggtacaaattcagcttctgtccaatgaaatacagaaaaggatatcacttttgtattagttcaggctgctatgccaaagaacca

SEQ ID NO: 165 - DNA, 559 bp, Homo sapiens
tttttagggtatcaagattttacattactaattctgaattcgttatcctttgctttcagccatattaaaactgaaagccttccatacctgatgtttttctatctcattatacagctttcctgtcagatcttcttttagggtgactttgaagaatcagaacatcagggctccaactctcagtagagccagtaaccagcttcctgatttaaaaaaaatcacctttggcctaattttgtcacttataaacagtggtattgcagtaccctggtatgattagttatgatatgtttaacaataattttaaaataccaaagcttgtgaattattttactttcaaaaaattatgtaggtaggaatggtaattctaaaggcactgtcgtttgcttacacattctaacatatttctaataagaaagtacctgctttcttaagagaaaaagggataagttaccaaaagcagcacgttctcctgggctcataccccggattcatccatgaggccacttccattgtaaagcttttagcatctcttgatttctcttcacactgaggcacaaag

SEQ ID NO: 166 - DNA, 933 bp, Homo sapiens
atggcgctgaggcggccaccgcgactccggctctgcgctcggctgcctgacttcttcctgctgctgcttttcaggggctgcctgataggggctgtaaatctcaaatccagcaatcgaaccccagtggtacaggaatttgaaagtgtggaactgtcttgcatcattacggattcgcagacaagtgaccccaggatcgagtggaagaaaattcaagatgaacaaaccacatatgtgttttttgacaacaaaattcagggagacttggcgggtcgtgcagaaatactggggaagacatccctgaagatctggaatgtgacacggagagactcagccctttatcgctgtgaggtcgttgctcgaaatgaccgcaaggaaattgatgagattgtgatcgagttaactgtgcaagtgaagccagtgacccctgtctgtagagtgccgaaggctgtaccagtaggcaagatggcaacactgcactgccaggagagtgagggccacccccggcctcactacagctggtatcgcaatgatgtaccactgcccacggattccagagccaatcccagatttcgcaattcttctttccacttaaactctgaaacaggcactttggtgttcactgctgttcacaaggacgactctgggcagtactactgcattgcttccaatgacgcaggctcagccaggtgtgaggagcaggagatggaagtctatgacctgaacattggcggaattattgggggggttctggttgtccttgctgtactggccctgatcacgttgggcatctgctgtgcatacagacgtggctacttcatcaacaataaacaggatggagaaagttacaagaacccagggaaaccagatggagttaactacatccgcactgacgaggagggcgacttcagacacaagtcatcgtttgtgatctga

SEQ ID NO: 167 - DNA, 557 bp, Homo sapiens
ttttttttttttttttttttttatagcaaactttttatgtcagaagtttattttattggtaaaatattaaataatatacagaattaaaaactgcacttacacttctgagaagaaataaatcttggacaaattatatgcttgttcctgagattccctaaatttattccagtagctgggcactcagacagtacaaacctttataatataatccttttcacaaagtattacaaagtttctgcagcttctttagttgtacacacatacagacacacactcacacatgcatatacaacactcatacacatatacacagtaaccacatacatgcacagaacatgtatgtgtgtgcattaaaaacaaagaagatacaagtcccacattttagtctgcagtgataaaactatttagcggaggtctccaaatcagtatgtagtagagtgacttgtcacacagctgcaaagactgtttcagtatttccatagtaaacctcattttctgaggtatggtatttgagccttaaaaaaactacattacacttagcaaacctgacatacaag

SEQ ID NO: 168 - DNA, 422 bp, Homo sapiens
tttagattgtgatcactataattgacaaaattgatgttagtgaattatatttacaaacacttcacataaagattctatgtaactgatagttcattttatttttataagccttttgtaaacatactgctatgtaatatgagtatatataacatactaaagaacatatctttttagtccataaccattacttctaatggattataagtatacccagattttgaaatgtatacaaagaaaatttaacaaataataacatgtaagctatacatgtcatattttacctgttacccatcaatctgtttctgtttttaaaacacagttttcaaacactaagtctgtgattaaacaatgacactaaaattaaattgtttatatgtcctacctagttcaataggcttaacaaacatgtatgcatatatgtt

SEQ ID NO: 169 - DNA, 665 bp, Homo sapiens
actattctaaaaatttaagatcatgctattacctttaagaaaaataatagctttacgatggtttttaattctccatatgaaagttaaagacttcctttttggagtccaatggctgttaacataaatctaaatcctgagtaacctacgagatgcagatcacctggccaatcaagaggctccagggacatgtttacgacatggaaaaaccatgggtgttttttgcccaaaaagagtatgttccctgatggaaaaggcaggcttgagttcattatcttgagaacaaagatcaaggcaactgcagtagctgcttacctgtgtggccctgtattctctcactgatttttgctccaaggaggtcccaaacgagcagttcaccagactgactgccagataaaacggaatttccatcccagacaaagcacctgcaagaatgatttagaaatagtcctttcttcatcatgaaggaaggatatgttgaactggccaatgtaagcccaaatgaagtgatcatgaacatgtctgtaaatgtcttcgcccccagtaactcacaaactatacctctggggctcatctgatgtcatggaagagatgagcattcctgtctgcacatcaatgacattaagacagccatcttgtcctgtgctgaggacatggccactatctgc

SEQ ID NO: 170 - DNA, 1933 bp, Homo sapiens
agaagccacattagggccattaaggctgctagaatttagaaagaaaacacacagcctcccagagtgctgggattacaggcatgagccactgctcccagccttccagaggaattttaagcccatgtccaaacattctgtttgtataaatatattctaatttttaaataaatagtttctacttttctgaactttatattttttcttgctataatggattttcataatcagaaaagattaaattagtaatcatgaattgcctttaatatttggcagtaagtcaatgaaataataaggcacttatataccatctttgacatcattaaaagtatcaaatcccattaatctaaaacttctttaagcattttgaaagcagaaaatgtttacatggttctttcagttcctcaggctttttgtctaatgatgcgtgacttaggataagatttgaattaagtgcccagcttgaaacataataatttttctgtataagccacagatcctctacctcctttgtgttaaagcctttatatgaaacaattaagtagaagcattcaatagtgtgtcattaactgttcatactaataaatggatacagcacattttcatggcctgtaatgtagaacatactatataaagttctcagtttggggatgactaggtttctggaaggaatagaatgctaaatcaatggatggcattgggctgagaaacactgctgctactaatcagccttgaatgtgtaatgtgaacatgcaaaagagaacatgcatacactcaaatttgtacaatgctataactggaagttgaaggacttgaatttttatattgtgctattgttatgttttctgtaattgtttatatctaaggaatttttgaggtaatataaaagaaaaagagaataatgaacaatgatgtcactggagggtttttacattaaattagatcatttttcttcttattcacaataataatcttaatctttaagaattaattataatttaatattataattcataatctttaagaattaataattataatttaatattataattaataatctttaagaattaataatataatttaatattataattaataatctttaagaattaataattacaattaataattaataataatcttaatctttaagaattaataataatccttaatcgcaataataatcgcaaggaggagaagtaagtccctcctccttctgtatgaacttttctcccacatgctgctgtatggtttagtgagagtgaagttctaaagaacatcaatatgattggtgggataatccaaagacattttttcagaatcaaatggcatgtcgaaggtttgtttcttgcatatgtatttactggtccacagcacaaaataaagtgaccacatatacataggaaagttgaatttgtacacatacagcatctgaaatgtatctgatgttcagcatcaagatttcactgaacattgtagaaatgtgtatcttttgcatgtatattttacattgattttctatttatgtacatctagaaagttttaaccctaataaatagttttgtaattttgaataatagtgtcagtttatatgtgagggagtagagacagagaggttagcactggataataattagtaaggccaaaggagaaaatttcatagaaaatattgttgttgtcataatgagtacagcatgaaaggcttcctctacaagacactagtcaaagagttgagagctgcggtttctaatctttgtccattactcccttactccctatgagactgtggacctgtcacttggcctctctggtcttcagttttctcaccagtaaaacaaggaacttgaaccaaatgacctctagtgttccccttgggtttaaatgtctataaatgttcaatgactagaaaaaaaaaaaaaaaaaaaaaaaaaaa

SEQ ID NO: 171 - DNA, 1816 bp, Homo sapiens
ggaggccgaggaggcccccggggcccggccgcagctccaggacgcctggcgcggcccgcgggagccagggccagccgggcgaggggacggcgactcggggcgctcccagcgagagggccagggggagggcgagacccaggaggccgccgccgccgcccgccgccaggagcagaccctgcgtgatgccaccatggaggtgcagcgcgggcagttccaggggcggccggtctccgtgtgggacgtcctcttctcctcgtacctgagcgaggcccaccgagacgagctcctggcccagcacgcggccggcgccctgggcctgcccgacctcgtcgccgtcctcacccgggtcatcgaggagacggaggagcggctcagcaaggtgtccttccgcggcctgaggcgccaggtgtccgcctccgagctgcacacgtccgggatcctgggccccgagaccctgcgggacctggcccagggcactaagacgctgcaggaggtgacggagatggactcggtcaagcgctacctggagggcaccagctgcatcgcgggcgtcctggtgcccgccaaggaccagcccggccgccaggagaagatgagcatctaccaggccatgtggaagggcgtgctgcggcccggcacggccctggtgctgctggaggcgcaggcggccaccggcttcgtcatcgaccccgtgcgcaacctgaggctgtcggtggaggaggccgtggccgcgggcgtggtgggcggcgagatccaggagaagctgctgtcggccgagcgcgccgtcaccggctacaccgacccctacaccgggcagcagatctccctcttccaggccatgcagaaggacctcatcgtccgggagcacggcatccgcctgctggaggcccagatcgccacgggcggcgtcatcgaccccgtgcacagccaccgcgtgcccgtggacgtggcctaccggcgcggctacttcgacgaggagatgaaccgcgtcctggccgaccccagcgacgacaccaagggcttcttcgaccccaacacgcacgagaacctcacgtacctgcagcttctgcagagggccaccctggaccctgagacggggctcctatttctttctctctctctacagtgactgggcttcctccgtgcagttttctgcaactctggagaagtggaggcatacttgtgtgtctgggttgtttttttttttgtttttttttttttttgttttgtcattctttaattttgttgttttacccattcgttatctgtggaaaacgttttaagttgtcatgtgacagaaacttttcctttgtccatcgaggtgtttcataagttttttggtgtgttttctgggtcgtctatgtgtcatatggttttacttttctctcctttttcgttttcagaacatttttctgtctgttttggattcactgcttccattttacagaatgtcactctttagactctcagtccatcatgccatcgggtactcttgttgcagtgtaatttttattacatgcggttatttccctaacgatgtgctattcacgttcatcttcaaactcattttccatcagccagtgtctactatttagtgccctggctctatttcggtcctcctccccgggctttccctggctgctgtgctggccaaaagcatgggctttattctctccattggctgctgctccaccttagaggtgtgacctcactagcgttgactgagcgagtctgttgtggagaagaactttttgtagtaatttactaggaaaaattctgaacaagtaaaatatgaaggaaaaaaaaaaaaaaaaaa

SEQ ID NO: 172 - DNA, 1816 bp, Homo sapiens; identical to SEQ ID NO: 171

SEQ ID NO: 173 - DNA, 471 bp, Homo sapiens
ctttttttttctttttgagacagtctcgctctgttgcccaggctctgtcttccaaaaaaaaaaaaaaaaccacacacacacacaaataactgatcattgattctctttcccttcctgcagtctcccaaggtgtcaattaggaagtgccaaaatactaaagtctcatttaattttcctgatcaacttatgttctaataattaatgtggaaggagaggaaagaaagagaaaacaaatgagaatctaaggtagtaaacagcagcaacttagcgggaataaggggaacatggttctcactaaccaaataggactgataacgcttccaaaaaataaaatgttaggtgaagggaaatatggaaatatgttttactttctactaatagctgcaggcaggaaggtccaaacgcagggtttaactaagctgggggagtaggggagatgtttagagggaatactgaaagagaatcagtttc

SEQ ID NO: 174 - DNA, 720 bp, Homo sapiens
aagataacatgcctgagggagagcctggtgcctttgctatgaattaatatgcactttctgaaaactctaaagcctgggaaacattttagtttttgttaaggttctaaactgtgctacagatacttgtaagacttttaaaatcgagagtaagtatgttcttacataaggcctttcttaggaattatgtgtatataaatctttgaaatatctttatatacctgagttttaggttccaactgtgttagacatgagttagctagatccatggtctctagatggtttacttaaataggccaggcgcagtggctcacacctgtaatcctagcactttgggaggccgaggtgggcagatcacgaagtcaggagatcaagaccatctggctaacagggtgaaaccctgtctctactaaaaaatacaaaaaattagccaggcgtggtggtgggtgcctgtagtcccagctactcaggaggctgaggcaggagaatggtgtgaacccgggaggcagagcttgcagtgagccgagatcgcgccactgcactccagcctgagtggcaaagtgagactctgtctcaataaataaataaataaataaaaataagcctgtggctgtttgagggaaaagtaacatagtctgataattaattatgataataatatgatagttaaaaatacgtcattttaaacgatttcccagacacacactaaattgggtttatgaa

SEQ ID NO: 175 - DNA, 400 bp, Homo sapiens
ttattgttttttaaaaatacaattttgaaatttattgttgaaaatggacacatggaacaaaccaaaccttgttttatcatgtaattttcagaaaatatgtgatccataaagattaaaagaaagttgtattaagtctggcagctttagtattaacttgaaataaaatatggcaagctttccacgtcctcctttatttccacaatccatatgtacgagctagattccagtcagaacttccacaaatacttcactctttggtagcagcggttataaattacgcctttgctaatttgcgttgttcccaaccaggagaaacattaccacaaaaaaagtcagtttcatcctgcagtgttcccgcagcaaccatattaaagctgaagaataaagctcctttgtagta

SEQ ID NO: 176 - DNA, 222 bp, Homo sapiens
tttttttttttttttttttttttttttttttttttttttcctttgacagtgaccatttattacacacatcagactgggggaagaccattgacatagctgagcaccaggtagggtgtcctgggtattcgggcatgagagcagcaggggcctcctgacgcgggcaggagaaacatggcacccaccaggaggaggaagaggaggaagaggataaggaggaaggtc

SEQ ID NO: 177 - DNA, 559 bp, Homo sapiens
  misc_feature (1)..(559): n = a,c,t, or g
aattcgcggccgcgtcgacgctgcgagaagacgacagaagggccattctactaattttaaagaacatcttggaattttacactcttggaatcatagtcgtagaatcctttttttgagacagagtctcactctgtcgcccaggctggagtgcagtggccagatctcagctcactgaaacctcagcctcccaagttcaagtgattctcgtacctcagcctcctgagtagctggaattccaggctgtactcactgctttgctcatatccccgctcattaccagggacaggccagcacccctggcattgcatctcacatatccactgatggatggagaacagactgaaattcagtgccttagagaccacacactccaaccccctcattgtgcagatgggaaaactgagagccatagaagggaagtggcttgcccaaagccacacttactgttttccccacactgtaccacaaactttcaccattcttcaggtttggaaaaatactaataaactgatcaacactaaaaaaaaaaaagcggccgctcggttgtngcgcggccggg

SEQ ID NO: 178 - DNA, 421 bp, Homo sapiens
aattttcaaggcttttattggctgtagaaatggtctgggagacaaatgtcctaaaaatccccaatttcccttaactggcttcacaatctttggcaagtcactttacctctctgagcccccatgccctcatctctgcactaggtctgccttgacacttttgtttgcagggtttaggaccagatggaagtgccttgtaaactgaaaaataccacattatatatcatatcacattattatactttctgataaatggttacaaagctatctgaaatagaagtttacattttatttctgattaactttcaatattaagtgatagaacctaagaagcaaaagcgaacataaaattcaactggaaaatttgaaagagaaatggttttttctctaggaaatttgcactaataactttttcccaccatcc

SEQ ID NO: 179 - DNA, 462 bp, Homo sapiens
tttcactttttcattattttattgttgttttagtagcattttgaggtgaatgtatgcataatcagtgaattagacaagcatgcacatacatgatatctgatcaaacatttttttgtctctcatcatcctcataaaatttattcagtgggagaagctttttcttccatcagatacattccagttgtatgccaacatactcaggtaagagcaacattttggtcattttaaatagtttggtaattatgactcccagtcgcctacaataagaagaaactacaataatttagtactaaatttttcttccctctccaactgagtcttgtgttgagttgcctacttgcgctagcacatcttcccttgctggttgacatttttgctaagatttctccctctccttccaccccaccttggacacggaggtttctggcctccctttccccaggtccccaaaaaagaaatctg

SEQ ID NO: 180 - DNA, 526 bp, Homo sapiens
tttgacattttgtttattttattttaaatattaatatattcctcaccttgttctggggaggatttgagactgctcatatgatatgcatgccataaattagtaaaatgcaataaaaaataaagcatcagaccacagaaactatgccatgggtggtatagcaggccgtaggcggctgtaaagttgatccggaattggccttcagtctcttagtggtcaactgaaagggtgttgtggtcacatacatggctctcattcacaagagggcaatgtaccagctcttagaagaagcaaaactttttctagtacttgactctaaggaaaattacccacctcggcccagatgaaagagactagcgtggataatgtcctcaaaacatggcagcaaattcaggctcagtttctctgggctgtgtcctgcaggaagatccaaggtggtcaccctcagcctctgctcagtgagagcactgaaatccacactcccttgagcaaagaaacgatctgtatgtttcaattctttcttcagcac

SEQ ID NO: 181 - DNA, 350 bp, Homo sapiens
ttttttttttttttttttttttttttttttttttttttttttttttttttttggaaacagggcctcgctgggtggccctgactgctctaaaactccggagttaaagggatcctcccacctcaccctcccaagtagctgggattacaggcatgtcccactgggcctagctgaaacatcagtttctgactgaaggggaaactacaacaactttagggtttcccttaaaaggattacggccatggggaacttgactgagtaaacaaggctataaataaaaagcttttccaaaacattaaccatgggaagcatcattatccccataaaaggggggcatccaggttaaatggccc

SEQ ID NO: 182 - DNA, 400 bp, Homo sapiens
tttttttttttttttttcactttttaaaaatctttattaataaagtaattcattataatttttgaaaaaaaaaagttttaaaatggtctgccaacatgttaatgtaggttaggccatccaaaagacaaagcaaaacatcaacattaagtcataggctaggattatacaaatgagaacccccaccttatacattacttaatataagttaactacaaagagcctctccacttacatttttatcatgcatcttacatttaaaggcccttattcttttatagaaaaggtcataatacccaataaaaaagaatctgtaatatccctgatgcagcaacaattgatcacatgctttcacatgtgaccacaataggaataaaataacagcgtaaagaaatttgaaagt

SEQ ID NO: 183 - DNA, 336 bp, Homo sapiens
aaccggtccttctccaacctccaacttttggtttttggaaaaatgtttctctaacacctcaacagtttaaggtaatttagtacacatatatcagtattttggtgatctgaaaaagcaacccattttctaaattcatatttttcctaaaactttactatgtttttattttaagaggttcctgttatatacactttttacacatgcaaataaactttataccaagtgagtaaaaaaaaaaaaaaaaaaaaaaaaaaaaaaaaaaaaaaaaaaaaaaaaaaaaaaaaaaaagaaaaaagaaaaaaaaaaaaaaaaaaaaagaaggaaaaaaaaaaccaa

SEQ ID NO: 184 - DNA, 628 bp, Homo sapiens
  misc_feature (1)..(628): n = a,c,t, or g
cggcaaaaggggaagcccaaggcgtaatttgggtaccnccaggcacaagtccgaccgttgtaaaacggcggccagttaatttttttatatttaaaaagggtgaggataagatagagaaagtgtttttttttttttagaaatcccacattttaatacattgccatgcacataaggagtcaagtaatgctgaatacaaaatagtcaaatatccaaaatgataaagcagattttccagcctgatagagatcatgctcacagatacaagggaggcaaacatctgtacagtttcatttttatccattttataagagtcatgcccccctcaactctttttgaggacaactggaaacagaaggaaacataagaatatacaaaggagacccaaagggaattggcaagttgatagctgctgaagatatggaaatcggtggttcaaaattgtggtacacaataattcttatgtttagagaaaaaaagtttctaaacatcttatgccctggaagccaggaaactaaagtggatatccaacagaaaaggcactcttgttttaccacataacttgattgcctcctcctaagtctagtcctgggagtttttctaggatgcacagaggaaaaaaaaaaaaaaa

SEQ ID NO: 185 - DNA, 997 bp, Homo sapiens
cattagaacacaccatacaaatgttagttctatatggccaagacatctgatttaaatttgatgaaacacagcatgtcattgttttctagaacttaaccattttcgcttctagaatttcagtatgattgtaggcaatgccactgaggcagctgtgtcatccttcgtgcaaaatctttctgtcatcattcggcaaaacccatcaaccacagtggggaatctggcttcggtggtgtcgattctgagcaatatttcatctctgtcactggccagccatttcagggtgtccaattcaacaatggaggatgtcatcagtatagctgacaatatccttaattcagcctcagtaaccaactggacagtcttactgcgggaagaaaagtatgccagctcacggttactagagacattagaaaacatcagcactctggtgcctccgacagctcttcctctgaatttttctcggaaattcattgactggaaagggattccagtgaacaaaagccaatcaaaaggggttacagctatcagattaaaatgtgtccccaaaatacatctattcccatcagaggccgtgtgttaatcgggtcagaccaattccagagatcccttccagaaactattatcagcatgggctcgttgactctggggaacattctacccgtttccacacaatggaaattgtcaggtcaatggacctgtgatatccacggcttattcaaaacttattccataaatgaagctttctattttttccaagatagaagtcaaactgaaggccagctcaatgtctgtatggggacttcaatcctttggcggtggaagcatgccaggttgtcacctattgaaagtgaactaagaacattggtgacggtgcccatgttactcacatgaactcctctcacgattgtgtccccatttggtcacctctacaaattttcccgctggacaactgtgtaccacatgtgggacacggtatccccggacacacactaagacg

SEQ ID NO: 186 - DNA, 447 bp, Homo sapiens
  misc_feature (1)..(447): n = a,c,t, or g
tttgattgaaaaaaatatgaaatttaattttagacatggcaagttcaattacatcacttcatatcacagtagaaaatataatttgttctaccatgggaaatagtataatggaatagatcacaatagtagtataataaaatagaatatccaagtgcaaaaacaattttcaagtaagtacacacactgtttgaaggtactttattaagatcaaagatttttcattacatttatttataaatccttcctagtcaaaataaaataataaaaatctgtatctttagaaagaacatagttttgtaagtctgagaaggttatgtttgtcagtttcaaattattacagtttagatacattcaatcattacacaataccaggaaggtcagccttaaagataccaagaacttccatanttgtcagtaaaataagggtaaaaaattaaattttacttt

SEQ ID NO: 187 - DNA, 521 bp, Homo sapiens
  misc_feature (1)..(521): n = a,c,t, or g
agcgcaganngncagangcngananaaatcactaccaatataatggattttatatatcagattgctttattctggatatcatggtaacaatacagaaagtatacataatttcccatttctgcaagtagtcatgactgctgaagaaagaaaaacttaaagctacggcagaattattttatcggaaattctgattttgtttttaatttttgataactttttactaaaggtatgaacacacaaagagcttattttgttaggcaaatacacattaataagaatgcctagaagaggactgattcttcacacccggacccactggttgctgttgggccttgctttgctcttgcagtttggtattatttatgtacctcctggaatgtgccccccagactgatggaaatgcatctcttcctgggtgttgttggggaaaattatggtaaagagtattatcaagccctcctacaggaacaagaagaacattatcagaccagggcaaccagtctgaaacgccaaattgccca

SEQ ID NO: 188 - DNA, 342 bp, Homo sapiens
tttgacacttgatagatgtttttattgaaattccttcaccaaaggaatatttacttgtgaatctctaagcccacacacatacacaaataccattctgtacaaacatacgtatttaataatttgattcttctgctcaatactcaaagggggctgggaggaacagtttgtctcctagggcatgacatagactggacagtctttttataagagtgatacaactgggaagggagaacgctgtttcagaagataactcagatcctcttcttcaggaaagactgagtttggaacaccagggctttttttttttttttttttttttttttttttttttttttttttttt

SEQ ID NO: 189 - DNA, 710 bp, Homo sapiens
gaaacatagaagaagcattagccccagtttgtataaaatgtctgctgcaactgaattcatgatagttcatgaaaactgaaaatcattccaattttgtaaaactgctgctactggttttatcaataaagttttagcagatggaaaaaaaaaaaaaaaaaaaaaaaaaaaaaaaaaaaaaaaaaaaaaaaaaaaaaaaaaaaaaaaaaaaaaaaaaaaaaaaaaaaaaaaaaaaaaaaaaaaaaaaaactcaaggggcaacccaatgcccattataacaaaaagaaaaaacttttaaaagccctggcgggacccaattaaaccttactggcgggaaaaccccttttttccccctgttttaatacctggcaggccttgcaaatatcgccctttccacaatttgccaacgtgacggaccaatgcctttttccaaacggttatataccctaaaggcccactggaaaaattctttccaaaaaatgtcaggttaaaaaaccgggtaaaccgaattgtgaaacacccctctttttttcacaatattgccccaaaaatttgtgataacctcgtgtgactctttcggaaccaacggggccaacttgttaaaaacttcgtcctactacggaacaagtggcccacaattggggaaccatggctttccccttttacgggcaaaatacccctttataaggacttttggcccccttcgtgacgcg

SEQ ID NO: 190 - DNA, 427 bp, Homo sapiens
ggtaagaaaagaacattttatttccagtctattacaaacagtgtctgggtttagaaacagccgacagtgaagggacaaagaggtgttcacagggagctgctgggctgtggtcagggcaggctccaggctgtgcaagaggaagccacccagggcaggggacaatgggcccaacacagccccacctccgacgcaggggctgaggcctgggccaggggaaacacaggccaagccagcctttggccctgcgaggaggttcagacaagagccagcggagctcccaccaggggcccgaggcacggcgcctctcccagtggggtcagcaggcgaggctgctctgaggacaccacctgctcccggaaccttcccacaagggcttcactggggaacagtggggcccagaacccagagaccccgcaagccacacagc

SEQ ID NO: 191 - DNA, 504 bp, Homo sapiens
ttttttttttttttttgagacgagtctcgctctgtcgccaggctggagtgcaattgtgcaatctcggctcactgcaacctccactccagcctggtgaaagagcaaggttccgtccaaaataataataataataaaataaaatattctaaaagtatgacgtcaagatggccttaaaaaaaaaagctttatggaaaactgtgacaggccatatacaaatgtgaggtattcatcacccaaagatgccatttgctgagcaactactaagcgctaggcacgtgctggatgctttgcctaaatcagtatgtcaccaccacaagaggccttccctgactaccctgttaaagtaaatccactcctctccccactcgctagttattctctcacgttccctgttttttccttcttactactccttgtaatttatgatgtttttgtgtgctttttcaatcctcttccaccagacagactattagcttgccatgaacaggagtcatgttggtgagc

SEQ ID NO: 192 - DNA, 321 bp, Homo sapiens
ttttttttgcaagaaatcataattttgctgtctcaaagaaactttataacttatttacaaagtttttttcccaagatacaaagcaataagttaacattctcaatataaaactaaactttgacattttgaacacaaaacacagttgtttttagggggtcacattttccaaatttcacaagaaaaatgtcaagattctcatttcacaaagcatggggttttacagccacacaacagaacgcaaaaaggctaagcttgtgcaacatgtttccagaacaacaataataacaataataataataacaataatatgtacagtcatta

SEQ ID NO: 193 - DNA, 469 bp, Homo sapiens
ttttttttttttttttttggagacagggtctcactctgccacccaggcgggagtgcactgccatgatcacggctcactgcaatctcaacctcctgggctctggtgatcctcccacctcagcctaccaggtagctgggactacaggcacacaccaccacacacagctaacttttgtaattttagtagagatagggttttggcacgttgcccaggctggtctggaaatcctgggctcaagtgatccgcccaccttggcgtcccaaagtgctgggattacaggtgtgatctaccgcgcccggaccacctgcacatttaaaattgtgaacctctctgtatacttcagtaacttttcaaagatttctttgacacaaagttctcagaaatcttaaagctagcatttcacaacagaaaaaaagagcttctggttcactggtgaaattttactaataaaatttaaaaacaaaaagct

SEQ ID NO: 194 - DNA, 513 bp, Homo sapiens
tttttttttttttttttttttgagatgaaaaaaaaataccatattttattgattccaggttcttgcagtaatcaaacagataaaagatcctttaatactggtgcttggacagggttttacaaaacagaaagattatgcaatacttaatatttggtaacaatttttagcacatagtaaatattttattactttgggtaataaacattctgaaaaataaattctttcattatgatataacttatgatcctcaccctaacatggctatgttctctaattactcctttgtaagtaaaatcataagtaataatagttgtaatcacaagtaatactagttttaatcataatacacacataattttgaatcctgatttttctacttaaaagtatgtaatgaccatgttactatcttgctacataattttcataatcatcatttgaaaattgtacattgtacctgatcatatggatataccataaatcacaaaccacagctataccatattatcctaggca

SEQ ID NO: 195 - DNA, 1401 bp, Homo sapiens
atgtccaccaggtccgtgtcctcgtcctcctaccgcaggatgttcggcggcccgggcaccgcgagccggccgagctccagccggagctacgtgactacgtccacccgcacctacagcctgggcagcgcgctgcgccccagcaccagccgcagcctctacgcctcgtccccgggcggcgtgtatgccacgcgctcctctgccgtgcgcctgcggagcagcgtgcccggggtgcggctcctgcaggactcggtggacttctcgctggccgacgccatcaacaccgagttcaagaacacccgcaccaacgagaaggtggagctgcaggagctgaatgaccgcttcgccaactacatcgacaaggtgcgcttcctggagcagcagaataagatcctgctggccgagctcgagcagctcaagggccaaggcaagtcgcgcctgggggacctctacgaggaggagatgcgggagctgcgccggcaggtggaccagctaaccaacgacaaagcccgcgtcgaggtggagcgcgacaacctggccgaggacatcatgcgcctccgggagaaattgcaggaggagatgcttcagagagaggaagccgaaaacaccctgcaatctttcagacaggatgttgacaatgcgtctctggcacgtcttgaccttgaacgcaaagtggaatctttgcaagaagagattgcctttttgaagaaactccacgaagaggaaatccaggagctgcaggctcagattcaggaacagcatgtccaaatcgatgtggatgtttccaagcctgacctcacggctgccctgcgtgacgtacgtcagcaatatgaaagtgtggctgccaagaacctgcaggaggcagaagaatggtacaaatccaagtttgctgacctctctgaggctgccaaccggaacaatgacgccctgcgccaggcaaagcaggagtccactgagtaccggagacaggtgcagtccctcacctgtgaagtggatgcccttaaaggaaccaatgagtccctggaacgccagatgcgtgaaatggaagagaactttgccgttgaagctgctaactaccaagacactattggccgcctgcaggatgagattcagaatatgaaggaggaaatggctcgtcaccttcgtgaataccaagacctgctcaatgttaagatggcccttgacattgagattgccacctacaggaagctgctggaaggcgaggagagcaggatttctctgcctcttccaaacttttcctccctgaacctgagggaaactaatctggattcactccctctggttgatacccactcaaaaaggacacttctgattaagacggttgaaactagagatggacaggttatcaacgaaacttctcagcatcacgatgaccttgaataa
